(19) United States
(12) Patent Application Publication
(10) Pub. No.: US 2022/0226438 A1
(43) Pub. Date: Jul. 21, 2022

(54) COMPOSITIONS FOR SKIN AND WOUNDS AND METHODS OF USE THEREOF

(71) Applicant: AstraZeneca AB, Södertälje (SE)

(72) Inventors: Kenny Mikael Hansson, MöIndal (SE); Maria Wågberg, MöIndal (SE); Nils Bergenhem, Waltham, MA (US)

(73) Assignee: AstraZeneca AB, Södertälje (SE)

(21) Appl. No.: 17/609,579

(22) PCT Filed: May 8, 2020
(86) PCT No.: PCT/US2020/032126

§ 371 Date: Nov. 8, 2021

Related U.S. Application Data
(60) Provisional application No. 62/845,134, filed on May 8, 2019.

(51) Int. Cl. A61K 38/18; A61K 48/00; A61P 17/02; A61K 9/16; A61K 47/18; A61K 47/24; A61K 47/28

(52) U.S. Cl. CPC A61K 38/1866; A61K 48/0058; A61P 17/02; A61K 47/28; A61K 47/183; A61K 47/24; A61K 9/1617

(57) ABSTRACT

This disclosure relates to mRNA therapy for (i) the promotion and/or improvement of wound healing, (ii) the prevention and/or reduction of scar formation at a wound, (iii) the reduction of the visibility of a scar, and/or (iv) the treatment of epidermolysis bullosa. mRNAs for use in the invention, when intradermally (e.g., using microneedles) or topically administered in vivo, encode a wound healing polypeptide (e.g., a growth factor, a cytokine, a chemokine, a protease inhibitor, or a collagen).

### CROSS-REFERENCE TO RELATED APPLICATIONS

[0001] This application claims the priority benefit of U.S. Provisional Application No. 62/845,134, filed May 8, 2019, the content of which is incorporated by reference in its entirety herein.

### SEQUENCE LISTING

[0002] The instant application contains a Sequence Listing which has been submitted electronically in ASCII format and is hereby incorporated by reference in its entirety. Said ASCII copy, created on May 6, 2020, is named 45817-0054WO1_SL.txt and is 720,012 bytes in size.

### BACKGROUND

[0003] Wound healing is a complex, multicellular process resulting in epithelium restoration after injury. There are several stages of wound healing: inflammation, formation of granulation tissue, reepithelialization, matrix formation, and remodeling. Scar formation is a major part of wound healing. Scars are areas of fibrous tissue that form during the wound healing process in place of the normal skin that was present prior to the wound formation. A scar exhibits an altered extracellular matrix and has a reduced level of elastin fibers relative to normal skin. Nearly every wound results in some degree of scarring.

[0004] Wounds may be acute or chronic. Acute wounds are typically the result of an injury to the skin that occurs suddenly rather than over time (e.g., a surgical wound or a traumatic wound (e.g., a cut)). In normal subjects, acute wounds typically heal at predictable and expected rates according to the normal wound healing process. In contrast, chronic wounds are wounds that fail to progress through the phases of wound healing in an orderly and timely fashion (e.g., showing no significant progress towards healing in 30 days). Nonlimiting examples of chronic wounds include venous ulcers, diabetic foot ulcers, and pressure ulcers.

[0005] Wounds may be healed by primary intention, by secondary intention, or by tertiary intention. Wounds heal by primary intention when there is little tissue loss such that the wound edges are directly next to each other. Wounds healed by primary intention are also referred to as “closed wounds.” Wounds heal by secondary intention when the tissue loss at the wound is too great for the wound edges to be in close proximity with each other. Wounds healed by secondary intention are also referred to as “open wounds”. Open wounds may require skin grafts for healing to occur. Finally, wounds healed by tertiary intention are initially cleaned and debrided and then left open for several days before closure.

[0006] Nonhealing wounds present a major healthcare burden. Nonhealing wounds can result in prolonged hospital stays, diminished quality of life, increased risk of mortality, need for amputation, and increased likelihood of being discharged to a long-term care facility. For example, an estimated 71,000 patients with diabetic foot ulcers undergo limb or digit amputations each year in the US. Pressure ulcers have a high mortality rate and incur large costs for hospitals.

[0007] Numerous classes of polypeptides, such as, e.g., growth factors, cytokines, chemokines, protease inhibitors, and collagens play a central role in the wound healing process. Many of these polypeptides are also involved in scar formation and modulation of their activity has been shown to reduce scar formation. In addition, certain rare diseases involve skin pathology and some of these same polypeptides that promote wound healing may be lacking in some patients. For example, epidermolysis bullosa is a group of rare diseases that causes fragile, blistering skin, which may appear in response to injury, heat, rubbing, scratching, or adhesive tape. In some cases, blisters may even occur inside the body.

[0008] These classes of polypeptides may be deregulated in nonhealing acute and chronic wounds; however, it remains challenging to deliver agents to increase expression or activity of these polypeptides for potential therapeutic effects such as promoting or improving wound healing in a subject. Accordingly, there remains a need for compositions and methods for promoting or improving wound healing, reducing scar formation and treating certain rare diseases in a subject.

### SUMMARY

[0009] The present disclosure provides methods for promoting and/or improving wound healing in a subject in need thereof comprising intradermal (e.g., using microneedles) or topical administration of messenger RNA (mRNA) therapeutics, wherein the mRNA comprises an open reading frame (ORF) encoding a wound healing polypeptide (see, e.g., Table 1).

[0010] The present disclosure also provides methods for preventing and/or reducing scar formation at a wound in a subject in need thereof comprising intradermal (e.g., using microneedles) or topical administration of mRNA therapeutics, wherein the mRNA comprises an ORF encoding a wound healing polypeptide (see, e.g., Table 1).

[0011] The present disclosure also provides methods for reducing the visibility of a scar in a subject in need thereof comprising intradermal (e.g., using microneedles) or topical administration of mRNA therapeutics, wherein the mRNA comprises an ORF encoding a wound healing polypeptide (see, e.g., Table 1).

[0012] The present disclosure also provides methods for treating epidermolysis bullosa in a subject in need thereof comprising intradermal (e.g., using microneedles) or topical administration of mRNA therapeutics, wherein the mRNA comprises an ORF encoding a wound healing polypeptide (see, e.g., Table 1) (e.g., collagen).

[0013] The present disclosure provides mRNA therapeutics for: (i) the promotion and/or improvement of wound healing; (ii) the prevention and/or reduction of scar formation at a wound; (iii) the reduction of the visibility of a scar; and/or (iv) the treatment of epidermolysis bullosa. The mRNA therapeutics of the invention are particularly well-suited for these applications as the technology provides for the intradermal (e.g., using microneedles) or topical delivery of mRNA encoding a wound healing polypeptide (see, e.g., Table 1) followed by de novo synthesis of functional wound healing polypeptide within target cells. The instant disclosure encompasses the incorporation of modified nucleotides within therapeutic mRNAs to (1) minimize unwanted immune activation (e.g., the innate immune response associated with the in vivo introduction of foreign nucleic acids) and (2) optimize the translation efficiency of mRNA to protein. Exemplary aspects of the disclosure feature a combination of nucleotide modification to reduce the innate immune response and sequence optimization, in particular, within the open reading frame (ORF) of therapeutic mRNAs encoding a wound healing polypeptide to enhance protein expression.

[0014] In further embodiments, the mRNA therapeutic technology of the instant disclosure also features intradermal (e.g., using microneedles) or topical delivery of mRNA encoding a wound healing polypeptide via a lipid nanoparticle (LNP) delivery system. The instant disclosure features ionizable lipid-based LNPs, which have improved properties when combined with mRNA encoding a wound healing polypeptide and administered in vivo, for example, cellular uptake, intracellular transport and/or endosomal release or endosomal escape. The LNP formulations of the disclosure also demonstrate reduced immunogenicity associated with the in vivo intradermal (e.g., using microneedles) or topical administration of LNPs.

[0015] In certain aspects, the disclosure relates to compositions and delivery formulations comprising a polynucleotide, e.g., a ribonucleic acid (RNA), e.g., a mRNA, encoding a wound healing polypeptide and methods for: (i) promoting and/or improving wound healing in a human subject in need thereof by intradermally (e.g., using microneedles) or topically administering the same; (ii) preventing and/or reducing scar formation at a wound in a human subject in need thereof by intradermally (e.g., using microneedles) or topically administering the same; (iii) reducing the visibility of a scar in a human subject in need thereof by intradermally (e.g., using microneedles) or topically administering the same; and/or (iv) treating epidermolysis bullosa in a human subject in need thereof by intradermally (e.g., using microneedles) or topically administering the same.

[0016] The present disclosure provides a pharmaceutical composition comprising a lipid nanoparticle encapsulated mRNA that comprises an ORF encoding a wound healing polypeptide, wherein the composition is suitable for intradermal (e.g., using microneedles) or topical administration to a human subject in need of: (i) promotion and/or improvement of wound healing; (ii) prevention and/or reduction of scar formation at a wound; (iii) reduction of the visibility of a scar; and/or (iv) treatment of epidermolysis bullosa.

[0017] The present disclosure further provides a pharmaceutical composition comprising: (a) a mRNA that comprises (i) an open reading frame (ORF) encoding a wound healing polypeptide, wherein the ORF comprises at least one chemically modified nucleobase, sugar, backbone, or any combination thereof and (ii) an untranslated region (UTR) comprising a microRNA (miRNA) binding site; and (b) a delivery agent, wherein the pharmaceutical composition is suitable for intradermal (e.g., using microneedles) or topical administration to a human subject in need of: (i) promotion and/or improvement of wound healing; (ii) prevention and/or reduction of scar formation at a wound; (iii) reduction of the visibility of a scar; and/or (iv) treatment of epidermolysis bullosa.

[0018] In some embodiments, the wound healing polypeptide comprises the amino acid sequence set forth in any one of SEQ ID NOs: 9-38, 45-84, 197-211, and 213-255 or a mature form thereof.

[0019] The pharmaceutical composition comprising the polynucleotide is administered intradermally (e.g., using microneedles) or topically to the wound of the subject in need thereof. In some instances, the pharmaceutical composition is intradermally (e.g., using microneedles) or topically administered at a dose of 0.01 mg/kg to about 10 mg/kg of polynucleotide per subject body weight (mg/kg). In some instances, the pharmaceutical composition or polynucleotide is intradermally (e.g., using microneedles) or topically administered at a dose of 0.1 mg/kg to 2.0 mg/kg. In some instances, the pharmaceutical composition or polynucleotide is intradermally (e.g., using microneedles) or topically administered at a dose of 0.1 mg/kg to 1.5 mg/kg. In some instances, the pharmaceutical composition or polynucleotide is intradermally (e.g., using microneedles) or topically administered at a dose of 0.1 mg/kg to 1.0 mg/kg. In some instances, the pharmaceutical composition or polynucleotide is intradermally (e.g., using microneedles) or topically administered at a dose of 0.1 mg/kg to 0.5 mg/kg.

[0020] In one aspect, the disclosure features a method for promoting and/or improving wound healing in a human subject in need thereof, comprising intradermally or topically administering to a wound of the subject an effective amount of a pharmaceutical composition comprising a messenger RNA (mRNA) comprising an open reading frame (ORF) encoding a wound healing polypeptide.

[0021] In another aspect, the disclosure features a method for preventing and/or reducing scar formation at a wound in a human subject in need thereof, comprising intradermally or topically administering to the wound of the subject an effective amount of a pharmaceutical composition comprising a mRNA comprising an ORF encoding a wound healing polypeptide.

[0022] In some embodiments of the foregoing methods, the wound is a surgical wound, a burn, an abrasive wound, a skin biopsy site, a chronic wound, an injury, a graft wound, a diabetic wound, a diabetic ulcer, a pressure ulcer, a bed sore, or combinations thereof. In some instances, the injury is a traumatic injury wound. In some instances, the diabetic ulcer is a diabetic foot ulcer. In some embodiments, the the wound is a nonhealing wound. In some instances, the nonhealing wound is a diabetic foot ulcer, a pressure ulcer, or a chronic venous leg ulcer. In some instances, the wound is an open wound. In some instances, the wound is a closed wound. In some instances, the wound is an abraded wound.

[0023] In some embodiments of the foregoing methods, the subject has diabetes.

[0024] In another aspect, the disclosure features a method for reducing the visibility of a scar in a human subject in need thereof, comprising intradermally or topically administering to the scar of the subject an effective amount of a pharmaceutical composition comprising a mRNA comprising an ORF encoding a wound healing polypeptide.

[0025] In some embodiments of the foregoing methods, the wound healing polypeptide is selected from the group consisting of a growth factor, a cytokine, a chemokine, a protease inhibitor, and a collagen. In some instances, the wound healing polypeptide is a growth factor selected from the group consisting of amphiregulin, connective tissue growth factor (CTGF), epidermal growth factor (EGF), epigen, epiregulin, fibroblast growth factor 2 (FGF2), fibroblast growth factor 7 (FGF7), fibroblast growth factor 10 (FGF10), heparin binding epidermal growth factor-like growth factor (HB-EGF), insulin-like growth factor 1 (IGF1), insulin-like growth factor 2 (IGF2), neuregulin 1 (NRG-1), placental growth factor (PLGF), a platelet derived growth factor (PDGF) (e.g., PGDF-AA, PGDF-BB, or PGDF-AB), transforming growth factor α (TGF-α), transforming growth factor β (TGF-β), and vascular endothelial growth factor C (VEGF-C). In some instances, the wound healing polypeptide is a cytokine selected from the group consisting of granulocyte colony-stimulating factor (G-CSF), granulocyte macrophage colony stimulating factor (GM-CSF), hepatocyte growth factor (HGF), interleukin 1 (IL-1), interleukin 6 (IL-6), interleukin 8 (IL-8), interleukin 10 (IL-10), and tumor necrosis factor α (TNF-α). In some instances, the wound healing polypeptide is a chemokine selected from the group consisting of macrophage chemo-attractant protein (MCP-1) and stromal cell-derived factor 1 (SDF-1). In some instances, the wound healing polypeptide is protease inhibitor secretory leukocyte protease inhibitor (SLPI).

[0026] In another aspect, the disclosure features a method for treating epidermolysis bullosa in a human subject in need thereof, comprising intradermally or topically administering to a blister or skin erosion of the subject an effective amount of a pharmaceutical composition comprising a mRNA comprising an ORF encoding a collagen. In some instances, the collagen is selected from the group consisting of collagen type III, collagen type IV, collagen type V, collagen type VI, collagen type VII, collagen type VIII, collagen type XII, collagen type XIII, collagen type XIV, collagen type XVI, collagen type XVII, collagen type XVIII, collagen type XIX, and collagen type XXVIII.

[0027] In some embodiments of the foregoing methods, the wound healing polypeptide comprises the amino acid sequence set forth in any one of SEQ ID NOs: 9-38, 45-84, 197-211, or 213-255. In some instances, the wound healing polypeptide does not comprise VEGF-A.

[0028] In some embodiments of the foregoing methods, the method comprises topically administering to the subject the effective amount of the pharmaceutical composition. In some embodiments of the foregoing methods, the method comprises intradermally administering to the subject the effective amount of the pharmaceutical composition. In some instances, the intradermally administering is microneedle intradermal administering.

[0029] In some embodiments of the foregoing methods, the mRNA comprises a microRNA (miR) binding site. In some instances, the microRNA is expressed in an immune cell of hematopoietic lineage or a cell that expresses TLR7 and/or TLR8 and secretes pro-inflammatory cytokines and/or chemokines. In some instances, the microRNA binding site is for a microRNA selected from the group consisting of miR-126, miR-142, miR-144, miR-146, miR-150, miR-155, miR-16, miR-21, miR-223, miR-24, miR-27, miR-26a, or any combination thereof. In some instances, the microRNA binding site is for a microRNA selected from the group consisting of miR126-3p, miR-142-3p, miR-142-5p, miR-155, or any combination thereof. In some instances, the microRNA binding site is a miR-142-3p binding site. In some instances, the microRNA binding site is located in the 3′ UTR of the mRNA.

[0030] In some embodiments of the foregoing methods, the mRNA comprises a 3′ UTR, said 3′ UTR comprising a nucleic acid sequence at least about 90%, at least about 95%, at least about 96%, at least about 97%, at least about 98%, at least about 99%, or 100% identical to a 3′ UTR sequence of SEQ ID NO:111.

[0031] In some embodiments of the foregoing methods, the mRNA comprises a 5′ UTR, said 5′ UTR comprising a nucleic acid sequence at least 90%, at least about 95%, at least about 96%, at least about 97%, at least about 98%, at least about 99%, or 100% identical to a 5′ UTR sequence of SEQ ID NO:3.

[0032] In some embodiments of the foregoing methods, the mRNA comprises a 5′ terminal cap. In some instances, the 5′ terminal cap comprises a Cap0, Cap1, ARCA, inosine, N1-methyl-guanosine, 2′-fluoro-guanosine, 7-deaza-guanosine, 8-oxo-guanosine, 2-amino-guanosine, LNA-guanosine, 2-azidoguanosine, Cap2, Cap4, 5′ methylG cap, or an analog thereof.

[0033] In some embodiments of the foregoing methods, the mRNA comprises a poly-A region. In some instances, the poly-A region is at least about 10, at least about 20, at least about 30, at least about 40, at least about 50, at least about 60, at least about 70, at least about 80, at least about 90 nucleotides in length, or at least about 100 nucleotides in length. In some instances, the poly-A region has about 10 to about 200, about 20 to about 180, about 50 to about 160, about 70 to about 140, or about 80 to about 120 nucleotides in length.

[0034] In some embodiments of the foregoing methods, the mRNA comprises at least one chemically modified nucleobase, sugar, backbone, or any combination thereof. In some instances, the at least one chemically modified nucleobase is selected from the group consisting of pseudouracil (ψ), N1 methylpseudouracil (m1ψ), 1-ethylpseudouracil, 2-thiouracil (s2U), 4′-thiouracil, 5-methylcytosine, 5-methyluracil, 5-methoxyuracil, and any combination thereof. In some instances, at least about 25%, at least about 30%, at least about 40%, at least about 50%, at least about 60%, at least about 70%, at least about 80%, at least about 90%, at least about 95%, at least about 99%, or 100% of the uracils are chemically modified to 5-methoxyuracil.

[0035] In some embodiments of the foregoing methods, the pharmaceutical composition further comprises a delivery agent. In some instances, the delivery agent comprises a lipid nanoparticle. In some instances, the lipid nanoparticle comprises: (a) (i) Compound II, (ii) Cholesterol, and (iii) PEG-DMG or Compound I; (b) (i) Compound VI, (ii) Cholesterol, and (iii) PEG-DMG or Compound I; (c) (i) Compound II, (ii) DSPC or DOPE, (iii) Cholesterol, and (iv) PEG-DMG or Compound I; (d) (i) Compound VI, (ii) DSPC or DOPE, (iii) Cholesterol, and (iv) PEG-DMG or Compound I; (e) (i) Compound II, (ii) Cholesterol, and (iii) Compound I; or (f) (i) Compound II, (ii) DSPC or DOPE, (iii) Cholesterol, and (iv) Compound I.

### BRIEF DESCRIPTION OF THE DRAWINGS

[0036] FIG. 1: Study timeline for the assessment of wound healing following intradermal injection of a wound healing polypeptide, modified VEGF-A RNA, in mouse.

[0037] FIG. 2: Effect of intradermal administration (injection) of a wound healing polypeptide, modified VEGF-A RNA, formulated with MC3 (mRNA VEGF 3 μg MC3), a non-translatable VEGF-A RNA formulated with MC3 (mRNA VEGF NT (3 μg) MC3), and a saline/citrate composition on wound healing.

[0038] FIG. 3: Study timeline for the assessment of wound healing following topical administration of a wound healing polypeptide, modified VEGF-A RNA, in mouse.

[0039] FIG. 4: Effect of topical administration of a wound healing polypeptide, modified VEGF-A RNA, formulated with MC3 (mRNA VEGF (3 μg) MC3), and a saline/citrate composition on wound healing.

[0040] FIG. 5A: Expression of a wound healing polypeptide, human VEGF-A (hVEGF-A) protein, in pig tissue 5-6 hours after topical administration of a modified VEGF-A RNA formulated with Compound II, topical administration of modified VEGF-A RNA formulated in saline/citrate, topical administration of a modified VEGF-A RNA formulated with MC3, and intradermal (single injection) administration of modified VEGF-A formulated with MC3.

[0041] FIG. 5B: Picture of a wound on pig skin, with drawn circles indicating sites of topical administration.

### DETAILED DESCRIPTION

[0042] The present disclosure provides mRNA therapeutics for the promotion and/or improvement of wound healing in a subject in need thereof. In particular, the present disclosure provides a method for promoting and/or improving wound healing in a subject in need thereof, comprising contacting a wound with a pharmaceutical composition or formulation comprising an mRNA comprising an ORF encoding a wound healing polypeptide or functional portion thereof, e.g., by contacting the skin, e.g., intradermally (e.g., using microneedles) or topically with the composition or formulation.

[0043] The present disclosure also provides mRNA therapeutics for the prevention and/or reduction in scar formation at a wound in a subject in need thereof. In particular, the present disclosure provides a method for preventing and/or reducing scar formation at a wound in a subject in need thereof, comprising intradermally (e.g., using microneedles) or topically administering to the subject a pharmaceutical composition comprising an mRNA comprising an ORF encoding a wound healing polypeptide.

[0044] The present disclosure also provides mRNA therapeutics for reducing the visibility of a scar in a subject in need thereof. In particular, the present disclosure provides a method for reducing the visibility of a scar in a subject in need thereof, comprising intradermally (e.g., using microneedles) or topically administering to the subject a pharmaceutical composition comprising an mRNA comprising an ORF encoding a wound healing polypeptide.

[0045] The present disclosure also provides mRNA therapeutics for treating epidermolysis bullosa in a subject in need thereof. In particular, the present disclosure provides a method for treating epidermolysis bullosa in a subject in need thereof, comprising intradermally (e.g., using microneedles) or topically administering to the subject a pharmaceutical composition comprising an mRNA comprising an ORF encoding a wound healing polypeptide (e.g., collagen).

[0046] Wound healing is a complex, multicellular process resulting in epithelium restoration after injury. There are several stages of wound healing: inflammation, formation of granulation tissue, reepithelialization, matrix formation, and remodeling. Scar formation is a major part of wound healing. Scars are areas of fibrous tissue that form during the wound healing process in place of the normal skin that was present prior to the wound formation. A scar exhibits an altered extracellular matrix and has a reduced level of elastin fibers relative to normal skin. Nearly every wound results in some degree of scarring.

[0047] Wounds may be acute or chronic. Acute wounds are typically the result of an injury to the skin that occurs suddenly rather than over time (e.g., a surgical wound or a traumatic wound (e.g., a cut)). Acute wounds typically heal at predictable and expected rates according to the normal wound healing process. In contrast, chronic wounds are wounds that fail to progress through the phases of wound healing in an orderly and timely fashion (e.g., showing no significant progress towards healing in 30 days). Nonlimiting examples of chronic wounds include venous ulcers, diabetic foot ulcers, and pressure ulcers. Numerous classes of polypeptides are involved in promoting wound healing, such as, e.g., growth factors (e.g., amphiregulin, connective tissue growth factor (CTGF), epidermal growth factor (EGF), epigen, epiregulin, fibroblast growth factor 2 (FGF2), fibroblast growth factor 7 (FGF7), fibroblast growth factor 10 (FGF10), heparin binding epidermal growth factor-like growth factor (HB-EGF), insulin-like growth factor 1 (IGF1), insulin-like growth factor 2 (IGF2), neuregulin 1 (NRG-1), placental growth factor (PLGF), a platelet derived growth factor (PDGF) (e.g., PGDF-AA, PGDF-BB, or PGDF-AB), transforming growth factor α (TGF-α), transforming growth factor β (TGF-β), and vascular endothelial growth factor C (VEGF-C)), cytokines (e.g., granulocyte colony-stimulating factor (G-CSF), granulocyte macrophage colony stimulating factor (GM-CSF), hepatocyte growth factor (HGF), interleukin 1 (IL-1), interleukin 6 (IL-6), interleukin 8 (IL-8), interleukin 10 (IL-10), and tumor necrosis factor α (TNF-α)), chemokines (e.g., macrophage chemo-attractant protein (MCP-1) and stromal cell-derived factor 1 (SDF-1)), protease inhibitors (e.g., secretory leukocyte protease inhibitor (SLPI)), and collagens (e.g., collagen type I, collagen type III, collagen type IV, collagen type V, collagen type VI, collagen type VII, collagen type VIII, collagen type XII, collagen type XIII, collagen type XIV, collagen type XVI, collagen type XVII, collagen type XVIII, collagen type XIX, or collagen type XXVIII). See Table 1 below for exemplary polypeptides involved in promoting wound healing (i.e., wound healing polypeptides). Deregulation of these factors may be observed in nonhealing acute and chronic wounds.

[0048] mRNA therapeutics are particularly well-suited for (i) the promotion and/or improvement of wound healing, (ii) prevention and/or reduction of scar formation at a wound, (iii) reduction of the visibility of a scar, and (iv) treatment of epidermolysis bullosa as the technology provides for the intradermal (e.g., using microneedles) or topical, intracellular delivery of mRNA encoding a wound healing polypeptide followed by de novo synthesis of functional wound healing protein within target cells. Surprisingly, after local delivery of mRNA to the target cells of the skin, the desired wound healing protein is expressed by the cells' own translational machinery, and hence, fully functional wound healing protein replaces the diminished, defective, or missing protein.

[0049] One challenge associated with delivering nucleic acid-based therapeutics (e.g., mRNA therapeutics) in vivo stems from the innate immune response, which can occur when the body's immune system encounters foreign nucleic acids. Foreign mRNAs can activate the immune system via recognition through toll-like receptors (TLRs), in particular TLR7/8, which is activated by single-stranded RNA (ssRNA). In nonimmune cells, the recognition of foreign mRNA can occur through the retinoic acid-inducible gene I (RIG-I). Immune recognition of foreign mRNAs can result in unwanted cytokine effects including interleukin-1β (IL-1β) production, tumor necrosis factor-α (TNF-α) distribution and a strong type I interferon (type I IFN) response. This disclosure features the incorporation of different modified nucleotides within therapeutic mRNAs to minimize the immune activation and optimize the translation efficiency of mRNA to protein. Particular aspects feature a combination of nucleotide modification to reduce the innate immune response and sequence optimization, in particular, within the open reading frame (ORF) of therapeutic mRNAs encoding a wound healing polypeptide to enhance protein expression.

[0050] Certain embodiments of the mRNA therapeutic technology of the instant disclosure also feature intradermal (e.g., using microneedles) or topical delivery of mRNA encoding a wound healing polypeptide via a lipid nanoparticle (LNP) delivery system. Lipid nanoparticles (LNPs) are an ideal platform for the safe and effective intradermal (e.g., using microneedles) or topical delivery of mRNAs to target cells. LNPs have the unique ability to intradermally (e.g., using microneedles) or topically deliver nucleic acids by a mechanism involving cellular uptake, intracellular transport and endosomal release or endosomal escape. The instant invention features ionizable lipid-based LNPs combined with mRNA encoding a wound healing polypeptide which have improved properties when administered in vivo. Without being bound in theory, it is believed that the ionizable lipid-based LNP formulations of the invention have improved properties, for example, cellular uptake, intracellular transport and/or endosomal release or endosomal escape.

### 1. WOUND HEALING AND WOUND HEALING POLYPEPTIDES

[0051] Wound healing is a complex, multicellular process resulting in epithelium restoration after injury. Wounds may be acute or chronic. Acute wounds are typically the result of an injury to the skin that occurs suddenly rather than over time (e.g., a surgical wound or a traumatic wound (e.g., a cut or scrape)). Acute wounds typically heal at predictable and expected rates according to the normal wound healing process. In contrast, chronic wounds are wounds that fail to progress through the phases of wound healing in an orderly and timely fashion (e.g., showing no significant progress towards healing in 30 days). Nonlimiting examples of chronic wounds include venous ulcers, diabetic foot ulcers, and pressure ulcers. Nonhealing wounds can lead to significant morbidities (e.g., necessity of amputation) and, in serious cases, death.

[0052] There are several stages of wound healing: inflammation, formation of granulation tissue, reepithelialization, matrix formation, and remodeling. Scar formation is a major part of wound healing. Scars are areas of fibrous tissue that form during the wound healing process in place of the normal skin that was present prior to the wound formation. A scar exhibits an altered extracellular matrix and has a reduced level of elastin fibers relative to normal skin. Nearly every wound results in some degree of scarring.

[0053] Numerous classes of polypeptides, such as, e.g., growth factors, cytokines, chemokines, protease inhibitors, and collagens play a central role in the wound healing process, including scar formation. The wild type canonical protein sequences corresponding to various wound healing polypeptides (and their various isoforms) are described in Table 1 below. These polypeptides may be deregulated (e.g., have reduced expression) in wounds, e.g., nonhealing acute and chronic wounds.

[0054] In certain embodiments, a wound healing polypeptide of a composition or method described herein is a growth factor wound healing polypeptide. Nonlimiting examples of growth factor wound healing polypeptides include amphiregulin, connective tissue growth factor (CTGF), epidermal growth factor (EGF), epigen, epiregulin, fibroblast growth factor 2 (FGF2), fibroblast growth factor 7 (FGF7), fibroblast growth factor 10 (FGF10), heparin binding epidermal growth factor-like growth factor (HB-EGF), insulin-like growth factor 1 (IGF1), insulin-like growth factor 2 (IGF2), neuregulin 1 (NRG-1), placental growth factor (PLGF), a platelet derived growth factor (PDGF) (e.g., PGDF-AA, PGDF-BB, or PGDF-AB), transforming growth factor α (TGF-α), transforming growth factor β (TGF-β), and vascular endothelial growth factor C (VEGF-C). In certain embodiments, the growth factor wound healing polypeptide is a member of the EGF family of proteins. Nonlimiting examples of wound healing EGF family proteins include amphiregulin, EGF, epigen, epiregulin, HB-EGF, and NRG-1. In certain embodiments, the growth factor wound healing polypeptide is a member of the FGF family of proteins. Nonlimiting examples of wound healing FGF family proteins include FGF2, FGF7, and FGF10. In certain embodiments, the growth factor wound healing polypeptide is a member of the TGF family of proteins. Nonlimiting examples of wound healing TGF family proteins include TGF-α and TGF-β. In certain embodiments, the growth factor wound healing polypeptide is a member of the VEGF family of proteins. Nonlimiting examples of wound healing VEGF family proteins include VEGF-C and PLGF. In certain embodiments, the growth factor wound healing polypeptide is a PDGF, which is a hetero- (PDGF-AB) or homo- (PDGF-AA or PDGF-BB) dimeric protein. Nonlimiting examples of wound healing PGDF family proteins include PDGF-AA, PDGF-BB, and PDGF-AB.

[0055] In certain embodiments, a wound healing polypeptide of a composition or method described herein is a cytokine wound healing polypeptide. Nonlimiting examples of cytokine wound healing polypeptides include granulocyte colony-stimulating factor (G-CSF), granulocyte macrophage colony stimulating factor (GM-CSF), hepatocyte growth factor (HGF), interleukin 1 (IL-1), interleukin 6 (IL-6), interleukin 8 (IL-8), interleukin 10 (IL-10), and tumor necrosis factor α (TNF-α). In certain embodiments, the cytokine wound healing polypeptide is a member of the interleukin family of proteins. Nonlimiting examples of wound healing interleukin family proteins include IL-1, IL-6, IL-8, and IL-10.

[0056] In certain embodiments, a wound healing polypeptide of a composition or method described herein is a chemokine wound healing polypeptide. Nonlimiting examples of chemokine wound healing polypeptides include macrophage chemo-attractant protein (MCP-1) and stromal cell-derived factor 1 (SDF-1).

[0057] In certain embodiments, a wound healing polypeptide of a composition or method described herein is a protease inhibitor wound healing polypeptide. A nonlimiting example of a protease inhibitor wound healing polypeptide is secretory leukocyte protease inhibitor (SLPI).

[0058] In certain embodiments, a wound healing polypeptide of a composition or method described herein is a collagen wound healing polypeptide. Nonlimiting examples of collagen wound healing polypeptides include collagen type I, collagen type III, collagen type IV, collagen type V, collagen type VI, collagen type VII, collagen type VIII, collagen type XII, collagen type XIII, collagen type XIV, collagen type XVI, collagen type XVII, collagen type XVIII, collagen type XIX, and collagen type XXVIII.

TABLE 1
Exemplary wound healing polypeptides

| | |
|---|---|
| Description | Sequence (SEQ ID NO; GenBank Accession No.) |

Growth Factors

| | |
|---|---|
| Homo sapiens | MRAPLLPPAPVVLSLLILGSGHYAAGLDLNDTYSGKREPFSGDHSADGFEVTSRSE |
| amphiregulin | MSSGSEISPVSEMPSSSEPSSGADYDYSEEYDNEPQIPGYIVDDSVRVEQVVKPPQ |
| | NKTESENTSDKPKRKKKGGKNGKNRRNRKKKNPCNAEFQNFCIHGECKYIEHLEAV |
| | TCKCQQEYFGERCGEKSMKTHSMIDSSLSKIALAAIAAFMSAVILTAVAVITVQLR |
| | RQYVRKYEGEAEERKKLRQENGNVHAIA (SEQ ID NO: 9; GenBank Accession No. |
| | NP_001648.1) |
| Homo sapiens | MTAASMGPVRVAFVVLLALCSRPAVGQNCSGPCRCPDEPAPRCPAGVSLVLDGCGC |
| CTGF | CRVCAKQLGELCTERDPCDPHKGLFCDFGSPANRKIGVCTAKDGAPCIFGGTVYRS |
| | GESFQSSCKYQCTCLDGAVGCMPLCSMDVRLPSPDCPFPRRVKLPGKCCEEWVCDE |
| | PKDQTVVGPALAAYRLEDTFGPDPTMIRANCLVQTTEWSACSKTCGMGISTRVTND |
| | NASCRLEKQSRLCMVRPCEADLEENIKKGKKCIRTPKISKPIKFELSGCTSMKTYR |
| | AKFCGVCTDGRCCTPHRTTTLPVEFKCPDGEVMKKNMMFIKTCACHYNCPGDNDIF |
| | ESLYYRKMYGDMA (SEQ ID NO: 10; GenBank Accession No. NP_001892.1) |
| Homo sapiens | MLLTLIILLPVVSKFSFVSLSAPQHWSCPEGTLAGNGNSTCVGPAPFLIFSHGNSI |
| EGF | FRIDTEGTNYEQLVVDAGVSVIMDFHYNEKRIYWVDLERQLLQRVFLNGSRQERVC |
| | NIEKNVSGMAINWINEEVIWSNQQEGIITVTDMKGNNSHILLSALKYPANVAVDPV |
| | ERFIFWSSEVAGSLYRADLDGVGVKALLETSEKITAVSLDVLDKRLFWIQYNREGS |
| | NSLICSCDYDGGSVHISKHPTQHNLFAMSLFGDRIFYSTWKMKTIWIANKHTGKDM |
| | VRINLHSSFVPLGELKVVHPLAQPKAEDDTWEPEQKLCKLRKGNCSSTVCGQDLQS |
| | HLCMCAEGYALSRDRKYCEDVNECAFWNHGCTLGCKNTPGSYYCTCPVGFVLLPDG |
| | KRCHQLVSCPRNVSECSHDCVLTSEGPLCFCPEGSVLERDGKTCSGCSSPDNGGCS |
| | QLCVPLSPVSWECDCFPGYDLQLDEKSCAASGPQPFLLFANSQDIRHMHFDGTDYG |
| | TLLSQQMGMVYALDHDPVENKIYFAHTALKWIERANMDGSQRERLIEEGVDVPEGL |
| | AVDWIGRRFYWTDRGKSLIGRSDLNGKRSKIITKENISQPRGIAVHPMAKRLFWTD |
| | TGINPRIESSSLQGLGRLVIASSDLIWPSGITIDFLTDKLYWCDAKQSVIEMANLD |
| | GSKRRRLTQNDVGHPFAVAVFEDYVWFSDWAMPSVMRVNKRTGKDRVRLQGSMLKP |
| | SSLVVVHPLAKPGADPCLYQNGGCEHICKKRLGTAWCSCREGFMKASDGKTCLALD |
| | GHQLLAGGEVDLKNQVTPLDILSKTRVSEDNITESQHMLVAEIMVSDQDDCAPVGC |
| | SMYARCISEGEDATCQCLKGFAGDGKLCSDIDECEMGVPVCPPASSKCINTEGGYV |
| | CRCSEGYQGDGIHCLDIDECQLGEHSCGENASCTNTEGGYTCMCAGRLSEPGLICP |
| | DSTPPPHLREDDHHYSVRNSDSECPLSHDGYCLHDGVCMYIEALDKYACNCVVGYI |
| | GERCQYRDLKWWELRHAGHGQQQKVIVVAVCVVVLVMLLLLSLWGAHYYRTQKLLS |
| | KNPKNPYEESSRDVRSRRPADTEDGMSSCPQPWFVVIKEHQDLKNGGQPVAGEDGQ |
| | AADGSMQPTSWRQEPQLCGMGTEQGCWIPVSSDKGSCPQVMERSFHMPSYGTQTLE |
| | GGVEKPHSLLSANPLWQQRALDPPHQMELTQ (SEQ ID NO: 11; GenBank |
| | Accession No. NP_001954.2) |
| Homo sapiens | MALGVPISVYLLFNAMTALTEEAAVTVTPPITAQQGNWTVNKTEADNIEGPIALKF |
| epigen, isoform | SHLCLEDHNSYCINGACAFHHELEKAICRCFTGYTGERCEHLTLTSYAVDSYEKYI |
| 1 precursor | AIGIGVGLLLSGFLVIFYCYIRKRCLKLKSPYNVCSGERRPL (SEQ ID NO: 12; |
| | GenBank Accession No. NP_001257918.1) |
| Homo sapiens | MALGVPISVYLLFNAMTALTEEAAVTVTPPITAQQGNWTVNKTEADNIEGPIALKF |
| epigen, isoform | SHLCLEDHNSYCINGACAFHHELEKAICRCFTGYTGERCLKLKSPYNVCSGERRPL |
| 2 precursor | (SEQ ID NO: 13; GenBank Accession No. NP_001257919.1) |
| Homo sapiens | MALGVPISVYLLFNAMTALTEEAAVTVTPPITAQQADNIEGPIALKFSHLCLEDHN |
| epigen, isoform | SYCINGACAFHHELEKAICRCFTGYTGERCLKLKSPYNVCSGERRPL (SEQ ID |
| 3 precursor | NO: 14; GenBank Accession No. NP_001257920.1) |
| Homo sapiens | MALGVPISVYLLFNAMTALTEEAAVTVTPPITAQQGNWTVNKTEADNIEGPIALKF |
| epigen, isoform | SHLCLEDHNSYCINGACAFHHELEKAICRCLKLKSPYNVCSGERRPL (SEQ ID |
| 4 precursor | NO: 15; GenBank Accession No. NP_001257921.1) |
| Homo sapiens | MALGVPISVYLLFNAMTALTEEAAVTVTPPITAQQADNIEGPIALKFSHLCLEDHN |
| epigen, isoform | SYCINGACAFHHELEKAICRCLKLKSPYNVCSGERRPL (SEQ ID NO: 16; GenBank |
| 5 precursor | Accession No. NP_001257922.1) |
| Homo sapiens | MTAGRRMEMLCAGRVPALLLCLGFHLLQAVLSTTVIPSCIPGESSDNCTALVQTED |
| epiregulin | NPRVAQVSITKCSSDMNGYCLHGQCIYLVDMSQNYCRCEVGYTGVRCEHFFLTVHQ |
| | PLSKEYVALTVILIILFLITVVGSTYYFCRWYRNRKSKEPKKEYERVTSGDPELPQ |
| | V (SEQ ID NO: 17; GenBank Accession No. NP_001423.1) |
| Homo sapiens | MAAGSITTLPALPEDGGSGAFPPGHFKDPKRLYCKNGGFFLRIHPDGRVDGVREKS |
| FGF2, isoform | DPHIKLQLQAEERGVVSIKGVCANRYLAMKEDGRLLASKCVTDECFFFERLESNNY |
| 18 kDa | NTYRSRKYTSWYVALKRTGQYKLGSKTGPGQKAILFLPMSAKS (SEQ ID NO: 18; |
| | GenBank Accession No. NP_001348594.1) |
| Homo sapiens | MVGVGGGDVEDVTPRPGGCQISGRGARGCNGIPGAAAWEAALPRRRPRRHPSVNPR |
| FGF2, isoform | SRAAGSPRTRGRRTEERPSGSRLGDRGRGRALPGGRLGGRGRGRAPERVGGRGRGR |
| 34 kDa | GTAAPRAAPAARGSRPGPAGTMAAGSITTLPALPEDGGSGAFPPGHFKDPKRLYCK |
| | NGGFFLRIHPDGRVDGVREKSDPHIKLQLQAEERGVVSIKGVCANRYLAMKEDGRL |
| | LASKCVTDECFFFERLESNNYNTYRSRKYTSWYVALKRTGQYKLGSKTGPGQKAIL |
| | FLPMSAKS (SEQ ID NO: 19; GenBank Accession No. NP_001997.5) |
| Homo sapiens | MHKWILTWILPTLLYRSCFHIICLVGTISLACNDMTPEQMATNVNCSSPERHTRSY |
| FGF7 | DYMEGGDIRVRRLFCRTQWYLRIDKRGKVKGTQEMKNNYNIMEIRTVAVGIVAIKG |
| | VESEFYLAMNKEGKLYAKKECNEDCNFKELILENHYNTYASAKWTHNGGEMFVALN |
| | QKGIPVRGKKTKKEQKTAHFLPMAIT (SEQ ID NO: 20; GenBank Accession No. |
| | NP_002000.1) |
| Homo sapiens | MWKWILTHCASAFPHLPGCCCCCFLLLFLVSSVPVTCQALGQDMVSPEATNSSSSS |
| FGF10 | FSSPSSAGRHVRSYNHLQGDVRWRKLFSFTKYFLKIEKNGKVSGTKKENCPYSILE |
| | ITSVEIGVVAVKAINSNYYLAMNKKGKLYGSKEFNNDCKLKERIEENGYNTYASFN |
| | WQHNGRQMYVALNGKGAPRRGQKTRRKNTSAHFLPMVVHS (SEQ ID NO: 21; |
| | GenBank Accession No. NP_004456.1) |
| Homo sapiens | MKLLPSVVLKLFLAAVLSALVTGESLERLRRGLAAGTSNPDPPTVSTDQLLPLGGG |
| HB-EGF | RDRKVRDLQEADLDLLRVTLSSKPQALATPNKEEHGKRKKKGKGLGKKRDPCLRKY |
| | KDFCIHGECKYVKELRAPSCICHPGYHGERCHGLSLPVENRLYTYDHTTILAVVAV |
| | VLSSVCLLVIVGLLMFRYHRRGGYDVENEEKVKLGMTNSH (SEQ ID NO: 22; |
| | GenBank Accession No. NP_001936.1) |
| Homo sapiens | MGKISSLPTQLFKCCFCDFLKVKMHTMSSSHLFYLALCLLTFTSSATAGPETLCGA |
| IGF-1, isoform 1 | ELVDALQFVCGDRGFYFNKPTGYGSSSRRAPQTGIVDECCFRSCDLRRLEMYCAPL |
| preprotein | KPAKSARSVRAQRHTDMPKTQKYQPPSTNKNTKSQRRKGSTFEERK (SEQ ID |
| | NO: 23; GenBank Accession No. NP_001104753.1) |
| Homo sapiens | MITPTVKMHTMSSSHLFYLALCLLTFTSSATAGPETLCGAELVDALQFVCGDRGFY |
| IGF-1, isoform 2 | FNKPTGYGSSSRRAPQTGIVDECCFRSCDLRRLEMYCAPLKPAKSARSVRAQRHTD |
| preprotein | MPKTQKEVHLKNASRGSAGNKNYRM (SEQ ID NO: 24; GenBank Accession No. |
| | NP_001104754.1) |
| Homo sapiens | MGKISSLPTQLFKCCFCDFLKVKMHTMSSSHLFYLALCLLTFTSSATAGPETLCGA |
| IGF-1, isoform 3 | ELVDALQFVCGDRGFYFNKPTGYGSSSRRAPQTGIVDECCFRSCDLRRLEMYCAPL |
| preprotein | KPAKSARSVRAQRHTDMPKTQKYQPPSTNKNTKSQRRKGWPKTHPGGEQKEGTEAS |
| | LQIRGKKKEQRREIGSRNAECRGKKGK (SEQ ID NO: 25; GenBank Accession No. |
| | NP_001104755.1) |
| Homo sapiens | MGKISSLPTQLFKCCFCDFLKVKMHTMSSSHLFYLALCLLTFTSSATAGPETLCGA |
| IGF-1, isoform 4 | ELVDALQFVCGDRGFYFNKPTGYGSSSRRAPQTGIVDECCFRSCDLRRLEMYCAPL |
| preprotein | KPAKSARSVRAQRHTDMPKTQKEVHLKNASRGSAGNKNYRM (SEQ ID NO: 26; |
| | GenBank Accession No. NP_000609.1) |
| Homo sapiens | MGIPMGKSMLVLLTFLAFASCCIAAYRPSETLCGGELVDTLQFVCGDRGFYFSRPA |
| IGF-2, isoform 1 | SRVSRRSRGIVEECCFRSCDLALLETYCATPAKSERDVSTPPTVLPDNFPRYPVGK |
| preprotein | FFQYDTWKQSTQRLRRGLPALLRARRGHVLAKELEAFREAKRHRPLIALPTQDPAH |
| | GGAPPEMASNRK (SEQ ID NO: 27; GenBank Accession No. NP_001278791.1) |
| Homo sapiens | MVSPDPQIIVVAPETELASMQVQRTEDGVTIIQIFWVGRKGELLRRTPVSSAMQTP |
| IGF-2, isoform 1 | MGIPMGKSMLVLLTFLAFASCCIAAYRPSETLCGGELVDTLQFVCGDRGFYFSRPA |
| preprotein | SRVSRRSRGIVEECCFRSCDLALLETYCATPAKSERDVSTPPTVLPDNFPRYPVGK |
| | FFQYDTWKQSTQRLRRGLPALLRARRGHVLAKELEAFREAKRHRPLIALPTQDPAH |
| | GGAPPEMASNRK (SEQ ID NO: 28; GenBank Accession No. NP_001121070.1) |
| Homo sapiens | MCVVAYCKTKKQRKKLHDRLRQSLRSERNNMMNIANGPHHPNPPPENVQLVNQYVS |
| NRG-1, | KNVISSEHIVEREAETSFSTSHYTSTAHHSTTVTQTPSHSWSNGHTESILSESHSV |
| membrane- | IVMSSVENSRHSSPTGGPRGRLNGTGGPRECNSFLRHARETPDSYRDSPHSERYVS |
| bound isoform a | AMTTPARMSPVDFHTPSSPKSPPSEMSPPVSSMTVSMPSMAVSPFMEEERPLLLVT |
| | PPRLREKKFDHHPQQFSSFHHNPAHDSNSLPASPLRIVEDEEYETTQEYEPAQEPV |
| | KKLANSRRAKRTKPNGHIANRLEVDSNTSSQSSNSESETEDERVGEDTPFLGIQNP |
| | LAASLEATPAFRLADSRTNPAGRFSTQEEIQARLSSVIANQDPIAV (SEQ ID |
| | NO: 29; GenBank Accession No. NP_001309131.1) |
| Homo sapiens | MSERKEGRGKGKGKKKERGSGKKPESAAGSQSPALPPRLKEMKSQESAAGSKLVLR |
| NRG-1, | CETSSEYSSLRFKWFKNGNELNRKNKPQNIKIQKKPGKSELRINKASLADSGEYMC |
| membrane- | KVISKLGNDSASANITIVESNEIITGMPASTEGAYVSSESPIRISVSTEGANTSSS |
| bound isoform | TSTSTTGTSHLVKCAEKEKTFCVNGGECFMVKDLSNPSRYLCKCQPGFTGARCTEN |
| isoform HRG- | VPMKVQNQEKAEELYQKRVLTITGICIALLVVGIMCVVAYCKTKKQRKKLHDRLRQ |
| alpha proprotein | SLRSERNNMMNIANGPHHPNPPPENVQLVNQYVSKNVISSEHIVEREAETSFSTSH |
| | YTSTAHHSTTVTQTPSHSWSNGHTESILSESHSVIVMSSVENSRHSSPTGGPRGRL |
| | NGTGGPRECNSFLRHARETPDSYRDSPHSERYVSAMTTPARMSPVDFHTPSSPKSP |
| | PSEMSPPVSSMTVSMPSMAVSPFMEEERPLLLVTPPRLREKKFDHHPQQFSSFHHN |
| | PAHDSNSLPASPLRIVEDEEYETTQEYEPAQEPVKKLANSRRAKRTKPNGHIANRL |
| | EVDSNTSSQSSNSESETEDERVGEDTPFLGIQNPLAASLEATPAFRLADSRTNPAG |
| | RFSTQEEIQARLSSVIANQDPIAV (SEQ ID NO: 30; GenBank Accession No. |
| | NP_039258.1) |
| Homo sapiens | MCVVAYCKTKKQRKKLHDRLRQSLRSERNNMMNIANGPHHPNPPPENVQLVNQYVS |
| NRG-1, | KNVISSEHIVEREAETSFSTSHYTSTAHHSTTVTQTPSHSWSNGHTESILSESHSV |
| membrane- | IVMSSVENSRHSSPTGGPRGRLNGTGGPRECNSFLRHARETPDSYRDSPHSERYVS |
| bound isoform | AMTTPARMSPVDFHTPSSPKSPPSEMSPPVSSMTVSMPSMAVSPFMEEERPLLLVT |
| isoform a | PPRLREKKFDHHPQQFSSFHHNPAHDSNSLPASPLRIVEDEEYETTQEYEPAQEPV |
| | KKLANSRRAKRTKPNGHIANRLEVDSNTSSQSSNSESETEDERVGEDTPFLGIQNP |
| | LAASLEATPAFRLADSRTNPAGRFSTQEEIQARLSSVIANQDPIAV (SEQ ID |
| | NO: 31; GenBank Accession No. NP_001309130.1) |
| Homo sapiens | MRWRRAPRRSGRPGPRAQRPGSAARSSPPLPLLPLLLLLGTAALAPGAAAGNEAAP |
| NRG-1, | AGASVCYSSPPSVGSVQELAQRAAVVIEGKVHPQRRQQGALDRKAAAAAGEAGAWG |
| membrane- | GDREPPAAGPRALGPPAEEPLLAANGTVPSWPTAPVPSAGEPGEEAPYLVKVHQVW |
| bound isoform | AVKAGGLKKDSLLTVRLGTWGHPAFPSCGRLKEDSRYIFFMEPDANSTSRAPAAFR |
| isoform GGF2 | ASFPPLETGRNLKKEVSRVLCKRCALPPRLKEMKSQESAAGSKLVLRCETSSEYSS |
| precursor | LRFKWFKNGNELNRKNKPQNIKIQKKPGKSELRINKASLADSGEYMCKVISKLGND |
| | SASANITIVESNATSTSTTGTSHLVKCAEKEKTFCVNGGECFMVKDLSNPSRYLCK |
| | CPNEFTGDRCQNYVMASFYSTSTPFLSLPE (SEQ ID NO: 32; GenBank Accession |
| | No. NP_039256.2) |
| Homo sapiens | MSERKEGRGKGKGKKKERGSGKKPESAAGSQSPALPPRLKEMKSQESAAGSKLVLR |
| NRG-1, | CETSSEYSSLRFKWFKNGNELNRKNKPQNIKIQKKPGKSELRINKASLADSGEYMC |
| membrane- | KVISKLGNDSASANITIVESNEIITGMPASTEGAYVSSESPIRISVSTEGANTSSS |
| bound isoform | TSTSTTGTSHLVKCAEKEKTFCVNGGECFMVKDLSNPSRYLCKCPNEFTGDRCQNY |
| isoform HRG- | VMASFYKHLGIEFMEAEELYQKRVLTITGICIALLVVGIMCVVAYCKTKKQRKKLH |
| beta 1 | DRLRQSLRSERNNMMNIANGPHHPNPPPENVQLVNQYVSKNVISSEHIVEREAETS |
| | FSTSHYTSTAHHSTTVTQTPSHSWSNGHTESILSESHSVIVMSSVENSRHSSPTGG |
| | PRGRLNGTGGPRECNSFLRHARETPDSYRDSPHSERYVSAMTTPARMSPVDFHTPS |
| | SPKSPPSEMSPPVSSMTVSMPSMAVSPFMEEERPLLLVTPPRLREKKFDHHPQQFS |
| | SFHHNPAHDSNSLPASPLRIVEDEEYETTQEYEPAQEPVKKLANSRRAKRTKPNGH |
| | IANRLEVDSNTSSQSSNSESETEDERVGEDTPFLGIQNPLAASLEATPAFRLADSR |
| | TNPAGRFSTQEEIQARLSSVIANQDPIAV (SEQ ID NO: 33; GenBank Accession |
| | No. NP_039250.2) |
| Homo sapiens | MGKGRAGRVGTTALPPRLKEMKSQESAAGSKLVLRCETSSEYSSLRFKWFKNGNEL |
| NRG-1, | NRKNKPQNIKIQKKPGKSELRINKASLADSGEYMCKVISKLGNDSASANITIVESN |
| membrane- | EIITGMPASTEGAYVSSESPIRISVSTEGANTSSSTSTSTTGTSHLVKCAEKEKTF |
| bound isoform | CVNGGECFMVKDLSNPSRYLCKCPNEFTGDRCQNYVMASFYKHLGIEFMEAEELYQ |
| isoform HRG- | KRVLTITGICIALLVVGIMCVVAYCKTKKQRKKLHDRLRQSLRSERNNMMNIANGP |
| beta 1b | HHPNPPPENVQLVNQYVSKNVISSEHIVEREAETSFSTSHYTSTAHHSTTVTQTPS |
| | HSWSNGHTESILSESHSVIVMSSVENSRHSSPTGGPRGRLNGTGGPRECNSFLRHA |
| | RETPDSYRDSPHSERYVSAMTTPARMSPVDFHTPSSPKSPPSEMSPPVSSMTVSMP |
| | SMAVSPFMEEERPLLLVTPPRLREKKFDHHPQQFSSFHHNPAHDSNSLPASPLRIV |
| | EDEEYETTQEYEPAQEPVKKLANSRRAKRTKPNGHIANRLEVDSNTSSQSSNSESE |
| | TEDERVGEDTPFLGIQNPLAASLEATPAFRLADSRTNPAGRFSTQEEIQARLSSVI |
| | ANQDPIAV (SEQ ID NO: 34; GenBank Accession No. NP_001153471.1) |
| Homo sapiens | MGKGRAGRVGTTALPPRLKEMKSQESAAGSKLVLRCETSSEYSSLRFKWFKNGNEL |
| NRG-1, | NRKNKPQNIKIQKKPGKSELRINKASLADSGEYMCKVISKLGNDSASANITIVESN |
| membrane- | EIITGMPASTEGAYVSSATSTSTTGTSHLVKCAEKEKTFCVNGGECFMVKDLSNPS |
| bound isoform | RYLCKCPNEFTGDRCQNYVMASFYKHLGIEFMEAEELYQKRVLTITGICIALLVVG |
| isoform HRG- | IMCVVAYCKTKKQRKKLHDRLRQSLRSERNNMMNIANGPHHPNPPPENVQLVNQYV |
| beta 1c | SKNVISSEHIVEREAETSFSTSHYTSTAHHSTTVTQTPSHSWSNGHTESILSESHS |
| | VIVMSSVENSRHSSPTGGPRGRLNGTGGPRECNSFLRHARETPDSYRDSPHSERYV |
| | SAMTTPARMSPVDFHTPSSPKSPPSEMSPPVSSMTVSMPSMAVSPFMEEERPLLLV |
| | TPPRLREKKFDHHPQQFSSFHHNPAHDSNSLPASPLRIVEDEEYETTQEYEPAQEP |
| | VKKLANSRRAKRTKPNGHIANRLEVDSNTSSQSSNSESETEDERVGEDTPFLGIQN |
| | PLAASLEATPAFRLADSRTNPAGRFSTQEEIQARLSSVIANQDPIAV (SEQ ID |
| | NO: 35; GenBank Accession No. NP_001153467.1) |
| Homo sapiens | MGKGRAGRVGTTALPPRLKEMKSQESAAGSKLVLRCETSSEYSSLRFKWFKNGNEL |
| NRG-1, | NRKNKPQNIKIQKKPGKSELRINKASLADSGEYMCKVISKLGNDSASANITIVESN |
| membrane- | ATSTSTTGTSHLVKCAEKEKTFCVNGGECFMVKDLSNPSRYLCKCPNEFTGDRCQN |
| bound isoform | YVMASFYKHLGIEFMEAEELYQKRVLTITGICIALLVVGIMCVVAYCKTKKQRKKL |
| isoform HRG- | HDRLRQSLRSERNNMMNIANGPHHPNPPPENVQLVNQYVSKNVISSEHIVEREAET |
| beta 1d | SFSTSHYTSTAHHSTTVTQTPSHSWSNGHTESILSESHSVIVMSSVENSRHSSPTG |
| | GPRGRLNGTGGPRECNSFLRHARETPDSYRDSPHSERYVSAMTTPARMSPVDFHTP |
| | SSPKSPPSEMSPPVSSMTVSMPSMAVSPFMEEERPLLLVTPPRLREKKFDHHPQQF |
| | SSFHHNPAHDSNSLPASPLRIVEDEEYETTQEYEPAQEPVKKLANSRRAKRTKPNG |
| | HIANRLEVDSNTSSQSSNSESETEDERVGEDTPFLGIQNPLAASLEATPAFRLADS |
| | RTNPAGRFSTQEEIQARLSSVIANQDPIAV (SEQ ID NO: 36; GenBank Accession |
| | No. NP_001153473.1) |
| Homo sapiens | MSERKEGRGKGKGKKKERGSGKKPESAAGSQSPALPPRLKEMKSQESAAGSKLVLR |
| NRG-1, | CETSSEYSSLRFKWFKNGNELNRKNKPQNIKIQKKPGKSELRINKASLADSGEYMC |
| membrane- | KVISKLGNDSASANITIVESNEIITGMPASTEGAYVSSESPIRISVSTEGANTSSS |
| bound isoform | TSTSTTGTSHLVKCAEKEKTFCVNGGECFMVKDLSNPSRYLCKCPNEFTGDRCQNY |
| isoform HRG- | VMASFYKAEELYQKRVLTITGICIALLVVGIMCVVAYCKTKKQRKKLHDRLRQSLR |
| beta 2 | SERNNMMNIANGPHHPNPPPENVQLVNQYVSKNVISSEHIVEREAETSFSTSHYTS |
| | TAHHSTTVTQTPSHSWSNGHTESILSESHSVIVMSSVENSRHSSPTGGPRGRLNGT |
| | GGPRECNSFLRHARETPDSYRDSPHSERYVSAMTTPARMSPVDFHTPSSPKSPPSE |
| | MSPPVSSMTVSMPSMAVSPFMEEERPLLLVTPPRLREKKFDHHPQQFSSFHHNPAH |
| | DSNSLPASPLRIVEDEEYETTQEYEPAQEPVKKLANSRRAKRTKPNGHIANRLEVD |
| | SNTSSQSSNSESETEDERVGEDTPFLGIQNPLAASLEATPAFRLADSRTNPAGRFS |
| | TQEEIQARLSSVIANQDPIAV (SEQ ID NO: 37; GenBank Accession No. |
| | NP_039251.2) |
| Homo sapiens | MSERKEGRGKGKGKKKERGSGKKPESAAGSQSPALPPRLKEMKSQESAAGSKLVLR |
| NRG-1, | CETSSEYSSLRFKWFKNGNELNRKNKPQNIKIQKKPGKSELRINKASLADSGEYMC |
| membrane- | KVISKLGNDSASANITIVESNEIITGMPASTEGAYVSSESPIRISVSTEGANTSSS |
| bound isoform | TSTSTTGTSHLVKCAEKEKTFCVNGGECFMVKDLSNPSRYLCKCPNEFTGDRCQNY |
| isoform HRG- | VMASFYKAEELYQKRVLTITGICIALLVVGIMCVVAYCKTKKQRKKLHDRLRQSLR |
| beta 2b | SERNNMMNIANGPHHPNPPPENVQLVNQYVSKNVISSEHIVEREAETSFSTSHYTS |
| | TAHHSTTVTQTPSHSWSNGHTESILSESHSVIVMSSVENSRHSSPTGGPRGRLNGT |
| | GGPRECNSFLRHARETPDSYRDSPHSER (SEQ ID NO: 38; GenBank Accession No. |
| | NP_001153480.1) |
| Homo sapiens | MSERKEGRGKGKGKKKERGSGKKPESAAGSQSPALPPRLKEMKSQESAAGSKLVLR |
| NRG-1, | CETSSEYSSLRFKWFKNGNELNRKNKPQNIKIQKKPGKSELRINKASLADSGEYMC |
| membrane- | KVISKLGNDSASANITIVESNEIITGMPASTEGAYVSSESPIRISVSTEGANTSSS |
| bound isoform | TSTSTTGTSHLVKCAEKEKTFCVNGGECFMVKDLSNPSRYLCKCPNEFTGDRCQNY |
| isoform HRG- | VMASFYSTSTPFLSLPE (SEQ ID NO: 45; GenBank Accession No. NP_039252.2) |
| beta 3 | |
| Homo sapiens | MSERKEGRGKGKGKKKERGSGKKPESAAGSQSPALPPRLKEMKSQESAAGSKLVLR |
| NRG-1, | CETSSEYSSLRFKWFKNGNELNRKNKPQNIKIQKKPGKSELRINKASLADSGEYMC |
| membrane- | KVISKLGNDSASANITIVESNATSTSTTGTSHLVKCAEKEKTFCVNGGECFMVKDL |
| bound isoform | SNPSRYLCKCPNEFTGDRCQNYVMASFYSTSTPFLSLPE (SEQ ID NO: 46; |
| isoform HRG- | GenBank Accession No. NP_001153477.1) |
| beta 3b | |
| Homo sapiens | MSERKEGRGKGKGKKKERGSGKKPESAAGSQSPALPPRLKEMKSQESAAGSKLVLR |
| NRG-1, | CETSSEYSSLRFKWFKNGNELNRKNKPQNIKIQKKPGKSELRINKASLADSGEYMC |
| membrane- | KVISKLGNDSASANITIVESNEIITGMPASTEGAYVSSESPIRISVSTEGANTSSS |
| bound isoform | TSTSTTGTSHLVKCAEKEKTFCVNGGECFMVKDLSNPSRYLCK (SEQ ID NO: 47; |
| isoform HRG- | GenBank Accession No. NP_004486.2) |
| gamma | |
| Homo sapiens | MSERKEGRGKGKGKKKERGSGKKPESAAGSQSPALPPRLKEMKSQESAAGSKLVLR |
| NRG-1, | CETSSEYSSLRFKWFKNGNELNRKNKPQNIKIQKKPGKSELRINKASLADSGEYMC |
| membrane- | KVISKLGNDSASANITIVESNEIITGMPASTEGAYVSSATSTSTTGTSHLVKCAEK |
| bound isoform | EKTFCVNGGECFMVKDLSNPSRYLCK (SEQ ID NO: 48; GenBank Accession No. |
| isoform HRG- | NP_001153474.1) |
| gamma 2 | |
| Homo sapiens | MSERKEGRGKGKGKKKERGSGKKPESAAGSQSPALPPRLKEMKSQESAAGSKLVLR |
| NRG- | CETSSEYSSLRFKWFKNGNELNRKNKPQNIKIQKKPGKSELRINKASLADSGEYMC |
| 1, membrane- | KVISKLGNDSASANITIVESNATSTSTTGTSHLVKCAEKEKTFCVNGGECFMVKDL |
| bound isoform | SNPSRYLCK (SEQ ID NO: 49; GenBank Accession No. NP_001153479.1) |
| isoform HRG- | |
| gamma 3 | |
| Homo sapiens | MEIYSPDMSEVAAERSSSPSTQLSADPSLDGLPAAEDMPEPQTEDGRTPGLVGLAV |
| NRG-1, | PCCACLEAERLRGCLNSEKICIVPILACLVSLCLCIAGLKWVFVDKIFEYDSPTHL |
| membrane- | DPGGLGQDPIISLDATAASAVWVSSEAYTSPVSRAQSESEVQVTVQGDKAVVSFEP |
| bound isoform | SAAPTPKNRIFAFSFLPSTAPSFPSPTRNPEVRTPKSATQPQTTETNLQTAPKLST |
| isoform III-2 | STSTTGTSHLVKCAEKEKTFCVNGGECFMVKDLSNPSRYLCKCPNEFTGDRCQNYV |
| | MASFYKHLGIEFMEAEELYQKRVLTITGICIALLVVGIMCVVAYCKTKKQRKKLHD |
| | RLRQSLRSERNNMMNIANGPHHPNPPPENVQLVNQYVSKNVISSEHIVEREAETSF |
| | STSHYTSTAHHSTTVTQTPSHSWSNGHTESILSESHSVIVMSSVENSRHSSPTGGP |
| | RGRLNGTGGPRECNSFLRHARETPDSYRDSPHSERHNLIAELRRNKAHRSKCMQIQ |
| | LSATHLRSSSIPHLGFIL (SEQ ID NO: 50; GenBank Accession No. |
| | NP_001309135.1) |
| Homo sapiens | MEIYSPDMSEVAAERSSSPSTQLSADPSLDGLPAAEDMPEPQTEDGRTPGLVGLAV |
| NRG-1, | PCCACLEAERLRGCLNSEKICIVPILACLVSLCLCIAGLKWVFVDKIFEYDSPTHL |
| membrane- | DPGGLGQDPIISLDATAASAVWVSSEAYTSPVSRAQSESEVQVTVQGDKAVVSFEP |
| bound isoform | SAAPTPKNRIFAFSFLPSTAPSFPSPTRNPEVRTPKSATQPQTTETNLQTAPKLST |
| isoform III-3 | STSTTGTSHLVKCAEKEKTFCVNGGECFMVKDLSNPSRYLCKCPNEFTGDRCQNYV |
| | MASFYKHLGIEFMEAEELYQKRVLTITGICIALLVVGIMCVVAYCKTKKQRKKLHD |
| | RLRQSLRSERNNMMNIANGPHHPNPPPENVQLVNQYVSKNVISSEHIVEREAETSF |
| | STSHYTSTAHHSTTVTQTPSHSWSNGHTESILSESHSVIVMSSVENSRHSSPTGGP |
| | RGRLNGTGGPRECNSFLRHARETPDSYRDSPHSER (SEQ ID NO: 51; GenBank |
| | Accession No. NP_001309136.1) |
| Homo sapiens | MEIYSPDMSEVAAERSSSPSTQLSADPSLDGLPAAEDMPEPQTEDGRTPGLVGLAV |
| NRG-1, | PCCACLEAERLRGCLNSEKICIVPILACLVSLCLCIAGLKWVFVDKIFEYDSPTHL |
| membrane- | DPGGLGQDPIISLDATAASAVWVSSEAYTSPVSRAQSESEVQVTVQGDKAVVSFEP |
| bound isoform | SAAPTPKNRIFAFSFLPSTAPSFPSPTRNPEVRTPKSATQPQTTETNLQTAPKLST |
| isoform NRG- | STSTTGTSHLVKCAEKEKTFCVNGGECFMVKDLSNPSRYLCKCPNEFTGDRCQNYV |
| III-beta1a | MASFYKHLGIEFMEAEELYQKRVLTITGICIALLVVGIMCVVAYCKTKKQRKKLHD |
| | RLRQSLRSERNNMMNIANGPHHPNPPPENVQLVNQYVSKNVISSEHIVEREAETSF |
| | STSHYTSTAHHSTTVTQTPSHSWSNGHTESILSESHSVIVMSSVENSRHSSPTGGP |
| | RGRLNGTGGPRECNSFLRHARETPDSYRDSPHSERYVSAMTTPARMSPVDFHTPSS |
| | PKSPPSEMSPPVSSMTVSMPSMAVSPFMEEERPLLLVTPPRLREKKFDHHPQQFSS |
| | FHHNPAHDSNSLPASPLRIVEDEEYETTQEYEPAQEPVKKLANSRRAKRTKPNGHI |
| | ANRLEVDSNTSSQSSNSESETEDERVGEDTPFLGIQNPLAASLEATPAFRLADSRT |
| | NPAGRFSTQEEIQARLSSVIANQDPIAV (SEQ ID NO: 52; GenBank Accession No. |
| | NP_001309134.1) |
| Homo sapiens | MSERKEGRGKGKGKKKERGSGKKPESAAGSQSPALPPRLKEMKSQESAAGSKLVLR |
| NRG-1, | CETSSEYSSLRFKWFKNGNELNRKNKPQNIKIQKKPGKSELRINKASLADSGEYMC |
| membrane- | KVISKLGNDSASANITIVESNEIITGMPASTEGAYVSSESPIRISVSTEGANTSSS |
| bound isoform | TSTSTTGTSHLVKCAEKEKTFCVNGGECFMVKDLSNPSRYLCKCQPGFTGARCTEN |
| isoform | VPMKVQNQEKAEELYQKRVLTITGICIALLVVGIMCVVAYCKTKKQRKKLHDRLRQ |
| ndf43proprotein | SLRSERNNMMNIANGPHHPNPPPENVQLVNQYVSKNVISSEHIVEREAETSFSTSH |
| | YTSTAHHSTTVTQTPSHSWSNGHTESILSESHSVIVMSSVENSRHSSPTGGPRGRL |
| | NGTGGPRECNSFLRHARETPDSYRDSPHSERHNLIAELRRNKAHRSKCMQIQLSAT |
| | HLRSSSIPHLGFIL (SEQ ID NO: 53; GenBank Accession No. NP_039254.1) |
| Homo sapiens | MSERKEGRGKGKGKKKERGSGKKPESAAGSQSPALPPRLKEMKSQESAAGSKLVLR |
| NRG-1, | CETSSEYSSLRFKWFKNGNELNRKNKPQNIKIQKKPGKSELRINKASLADSGEYMC |
| membrane- | KVISKLGNDSASANITIVESNEIITGMPASTEGAYVSSESPIRISVSTEGANTSSS |
| bound isoform | TSTSTTGTSHLVKCAEKEKTFCVNGGECFMVKDLSNPSRYLCKCPNEFTGDRCQNY |
| isoform ndf43b | VMASFYKAEELYQKRVLTITGICIALLVVGIMCVVAYCKTKKQRKKLHDRLRQSLR |
| | SERNNMMNIANGPHHPNPPPENVQLVNQYVSKNVISSEHIVEREAETSFSTSHYTS |
| | TAHHSTTVTQTPSHSWSNGHTESILSESHSVIVMSSVENSRHSSPTGGPRGRLNGT |
| | GGPRECNSFLRHARETPDSYRDSPHSERHNLIAELRRNKAHRSKCMQIQLSATHLR |
| | SSSIPHLGFIL (SEQ ID NO: 54; GenBank Accession No. NP_001153476.1) |
| Homo sapiens | MQIPKHISIEDITATSTSTTGTSHLVKCAEKEKTFCVNGGECFMVKDLSNPSRYLC |
| NRG-1, | KCQPGFTGARCTENVPMKVQNQEKAEELYQKRVLTITGICIALLVVGIMCVVAYCK |
| membrane- | TKKQRKKLHDRLRQSLRSERNNMMNIANGPHHPNPPPENVQLVNQYVSKNVISSEH |
| bound isoform | IVEREAETSFSTSHYTSTAHHSTTVTQTPSHSWSNGHTESILSESHSVIVMSSVEN |
| isoform ndf43c | SRHSSPTGGPRGRLNGTGGPRECNSFLRHARETPDSYRDSPHSERHNLIAELRRNK |
| | AHRSKCMQIQLSATHLRSSSIPHLGFIL (SEQ ID NO: 55; GenBank Accession No. |
| | NP_001153468.1) |
| Homo sapiens | MEIYSPDMSEVAAERSSSPSTQLSADPSLDGLPAAEDMPEPQTEDGRTPGLVGLAV |
| NRG-1, | PCCACLEAERLRGCLNSEKICIVPILACLVSLCLCIAGLKWVFVDKIFEYDSPTHL |
| membrane- | DPGGLGQDPIISLDATAASAVWVSSEAYTSPVSRAQSESEVQVTVQGDKAVVSFEP |
| bound isoform | SAAPTPKNRIFAFSFLPSTAPSFPSPTRNPEVRTPKSATQPQTTETNLQTAPKLST |
| isoform SMDF | STSTTGTSHLVKCAEKEKTFCVNGGECFMVKDLSNPSRYLCKCPNEFTGDRCQNYV |
| | MASFYSTSTPFLSLPE (SEQ ID NO: 56; GenBank Accession No. NP_039253.1) |
| Homo sapiens | MQIPKHISIEDITATSTSTTGTSHLVKCAEKEKTFCVNGGECFMVKDLSNPSRYLC |
| NRG-1, | KCPNEFTGDRCQNYVMASFYKAEELYQKRVLTITGICIALLVVGIMCVVAYCKTKK |
| membrane- | QRKKLHDRLRQSLRSERNNMMNIANGPHHPNPPPENVQLVNQYVSKNVISSEHIVE |
| bound isoform | REAETSFSTSHYTSTAHHSTTVTQTPSHSWSNGHTESILSESHSVIVMSSVENSRH |
| isoform VI-1 | SSPTGGPRGRLNGTGGPRECNSFLRHARETPDSYRDSPHSERYVSAMTTPARMSPV |
| | DFHTPSSPKSPPSEMSPPVSSMTVSMPSMAVSPFMEEERPLLLVTPPRLREKKFDH |
| | HPQQFSSFHHNPAHDSNSLPASPLRIVEDEEYETTQEYEPAQEPVKKLANSRRAKR |
| | TKPNGHIANRLEVDSNTSSQSSNSESETEDERVGEDTPFLGIQNPLAASLEATPAF |
| | RLADSRTNPAGRFSTQEEIQARLSSVIANQDPIAV (SEQ ID NO: 57; GenBank |
| | Accession No. NP_001309126.1) |
| Homo sapiens | MPVMRLFPCFLQLLAGLALPAVPPQQWALSAGNGSSEVEVVPFQEVWGRSYCRALE |
| PLGF, isoform 1 | RLVDVVSEYPSEVEHMFSPSCVSLLRCTGCCGDENLHCVPVETANVTMQLLKIRSG |
| precursor | DRPSYVELTFSQHVRCECRPLREKMKPERRRPKGRGKRRREKQRPTDCHLCGDAVP |
| | RR (SEQ ID NO: 58; GenBank Accession No. NP_002623.2) |
| Homo sapiens | MPVMRLFPCFLQLLAGLALPAVPPQQWALSAGNGSSEVEVVPFQEVWGRSYCRALE |
| PLGF, isoform 2 | RLVDVVSEYPSEVEHMFSPSCVSLLRCTGCCGDENLHCVPVETANVTMQLLKIRSG |
| precursor | DRPSYVELTFSQHVRCECRPLREKMKPERCGDAVPRR (SEQ ID NO: 59; GenBank |
| | Accession No. NP_001193941.1) |
| Homo sapiens | MPVMRLFPCFLQLLAGLALPAVPPQWALSAGNGSSEVEVVPFQEVWGRSYCRALER |
| PLGF, isoform 3 | LVDVVSEYPSEVEHMFSPSCVSLLRCTGCCGDENLHCVPVETANVTMQLLKIRSGD |
| precursor | RPSYVELTFSQHVRCECRPLREKMKPERRRPKGRGKRRREKQRPTDCHLCGDAVPR |
| | R (SEQ ID NO: 60; GenBank Accession No. NP_001280572.1) |
| Homo sapiens | MGTSHPAFLVLGCLLTGLSLILCQLSLPSILPNENEKVVQLNSSFSLRCFGESEVS |
| PDGF alpha | WQYPMSEEESSDVEIRNEENNSGLFVTVLEVSSASAAHTGLYTCYYNHTQTEENEL |
| subunit (PDGF- | EGRHIYIYVPDPDVAFVPLGMTDYLVIVEDDDSAIIPCRTTDPETPVTLHNSEGVV |
| A), isoform 1 | PASYDSRQGFNGTFTVGPYICEATVKGKKFQTIPFNVYALKATSELDLEMEALKTV |
| | YKSGETIVVTCAVFNNEVVDLQWTYPGEVKGKGITMLEEIKVPSIKLVYTLTVPEA |
| | TVKDSGDYECAARQATREVKEMKKVTISVHEKGFIEIKPTFSQLEAVNLHEVKHFV |
| | VEVRAYPPPRISWLKNNLTLIENLTEITTDVEKIQEIRYRSKLKLIRAKEEDSGHY |
| | TIVAQNEDAVKSYTFELLTQVPSSILDLVDDHHGSTGGQTVRCTAEGTPLPDIEWM |
| | ICKDIKKCNNETSWTILANNVSNIITEIHSRDRSTVEGRVTFAKVEETIAVRCLAK |
| | NLLGAENRELKLVAPTLRSELTVAAAVLVLLVIVIISLIVLVVIWKQKPRYEIRWR |
| | VIESISPDGHEYIYVDPMQLPYDSRWEFPRDGLVLGRVLGSGAFGKVVEGTAYGLS |
| | RSQPVMKVAVKMLKPTARSSEKQALMSELKIMTHLGPHLNIVNLLGACTKSGPIYI |
| | ITEYCFYGDLVNYLHKNRDSFLSHHPEKPKKELDIFGLNPADESTRSYVILSFENN |
| | GDYMDMKQADTTQYVPMLERKEVSKYSDIQRSLYDRPASYKKKSMLDSEVKNLLSD |
| | DNSEGLTLLDLLSFTYQVARGMEFLASKNCVHRDLAARNVLLAQGKIVKICDFGLA |
| | RDIMHDSNYVSKGSTFLPVKWMAPESIFDNLYTTLSDVWSYGILLWEIFSLGGTPY |
| | PGMMVDSTFYNKIKSGYRMAKPDHATSEVYEIMVKCWNSEPEKRPSFYHLSEIVEN |
| | LLPGQYKKSYEKIHLDFLKSDHPAVARMRVDSDNAYIGVTYKNEEDKLKDWEGGLD |
| | EQRLSADSGYIIPLPDIDPVPEEEDLGKRNRHSSQTSEESAIETGSSSSTFIKRED |
| | ETIEDIDMMDDIGIDSSDLVEDSFL (SEQ ID NO: 61; GenBank Accession No. |
| | NP_001334758.1) |
| Homo sapiens | MGTSHPAFLVLGCLLTGLSLILCQLSLPSILPNENEKVVQLNSSFSLRCFGESEVS |
| PDGF-A, | WQYPMSEEESSDVEIRNEENNSGLFVTVLEVSSASAAHTGLYTCYYNHTQTEENEL |
| isoform 2 | EGRHIYIYVPDPDVAFVPLGMTDYLVIVEDDDSAIIPCRTTDPETPVTLHNSEGVV |
| | PASYDSRQGFNGTFTVGPYICEATVKGKKFQTIPFNVYALKATSELDLEMEALKTV |
| | YKSGETIVVTCAVFNNEVVDLQWTYPGEVKGKGITMLEEIKVPSIKLVYTLTVPEA |
| | TVKDSGDYECAARQATREVKEMKKVTISVHEKGFIEIKPTFSQLEAVNLHEVKHFV |
| | VEVRAYPPPRISWLKNNLTLIENLTEITTDVEKIQEIRYRSKLKLIRAKEEDSGHY |
| | TIVAQNEDAVKSYTFELLTQVPSSILDLVDDHHGSTGGQTVRCTAEGTPLPDIEWM |
| | ICKDIKKCNNETSWTILANNVSNIITEIHSRDRSTVEGRVTFAKVEETIAVRCLAK |
| | NLLGAENRELKLVAPTLRSELTVAAAVLVLLVIVIISLIVLVVIWKQKPRYEIRWR |
| | VIESISPDGHEYIYVDPMQLPYDSRWEFPRDGLVLGRVLGSGAFGKVVEGTAYGLS |
| | RSQPVMKVAVKMLKPTARSSEKQALMSELKIMTHLGPHLNIVNLLGACTKSGPIYI |
| | ITEYCFYGDLVNYLHKNRDSFLSHHPEKPKKELDIFGLNPADESTRSYVILSFENN |
| | GDYMDMKQADTTQYVPMLERKEVSKYSDIQRSLYDRPASYKKKSMLGWAGGVGTRC |
| | QRNLSHAQAQALLAGRPLLSGLP (SEQ ID NO: 62; GenBank Accession No. |
| | NP_001334756.1) |
| Homo sapiens | MLPRLVLNSWAQMICLPQLPKFPRAMGTSHPAFLVLGCLLTGLSLILCQLSLPSIL |
| PDGF-A, | PNENEKVVQLNSSFSLRCFGESEVSWQYPMSEEESSDVEIRNEENNSGLFVTVLEV |
| isoform 3 | SSASAAHTGLYTCYYNHTQTEENELEGRHIYIYVPDPDVAFVPLGMTDYLVIVEDD |
| | DSAIIPCRTTDPETPVTLHNSEGVVPASYDSRQGFNGTFTVGPYICEATVKGKKFQ |
| | TIPFNVYALKATSELDLEMEALKTVYKSGETIVVTCAVFNNEVVDLQWTYPGEVKG |
| | KGITMLEEIKVPSIKLVYTLTVPEATVKDSGDYECAARQATREVKEMKKVTISVHE |
| | KGFIEIKPTFSQLEAVNLHEVKHFVVEVRAYPPPRISWLKNNLTLIENLTEITTDV |
| | EKIQEIRYRSKLKLIRAKEEDSGHYTIVAQNEDAVKSYTFELLTQVPSSILDLVDD |
| | HHGSTGGQTVRCTAEGTPLPDIEWMICKDIKKCNNETSWTILANNVSNIITEIHSR |
| | DRSTVEGRVTFAKVEETIAVRCLAKNLLGAENRELKLVAPTLRSELTVAAAVLVLL |
| | VIVIISLIVLVVIWKQKPRYEIRWRVIESISPDGHEYIYVDPMQLPYDSRWEFPRD |
| | GLVLGRVLGSGAFGKVVEGTAYGLSRSQPVMKVAVKMLKPTARSSEKQALMSELKI |
| | MTHLGPHLNIVNLLGACTKSGPIYIITEYCFYGDLVNYLHKNRDSFLSHHPEKPKK |
| | ELDIFGLNPADESTRSYVILSFENNGDYMDMKQADTTQYVPMLERKEVSKYSDIQR |
| | SLYDRPASYKKKSMLDSEVKNLLSDDNSEGLTLLDLLSFTYQVARGMEFLASKNCV |
| | HRDLAARNVLLAQGKIVKICDFGLARDIMHDSNYVSKGSTFLPVKWMAPESIFDNL |
| | YTTLSDVWSYGILLWEIFSLGGTPYPGMMVDSTFYNKIKSGYRMAKPDHATSEVYE |
| | IMVKCWNSEPEKRPSFYHLSEIVENLLPGQYKKSYEKIHLDFLKSDHPAVARMRVD |
| | SDNAYIGVTYKNEEDKLKDWEGGLDEQRLSADSGYIIPLPDIDPVPEEEDLGKRNR |
| | HSSQTSEESAIETGSSSSTFIKREDETIEDIDMMDDIGIDSSDLVEDSFL (SEQ ID |
| | NO: 63; GenBank Accession No. NP_001334757.1) |
| Homo sapiens | MGFAETIRKFPRAMGTSHPAFLVLGCLLTGLSLILCQLSLPSILPNENEKVVQLNS |
| PDGF-A, | SFSLRCFGESEVSWQYPMSEEESSDVEIRNEENNSGLFVTVLEVSSASAAHTGLYT |
| isoform 4 | CYYNHTQTEENELEGRHIYIYVPDPDVAFVPLGMTDYLVIVEDDDSAIIPCRTTDP |
| | ETPVTLHNSEGVVPASYDSRQGFNGTFTVGPYICEATVKGKKFQTIPFNVYALKAT |
| | SELDLEMEALKTVYKSGETIVVTCAVFNNEVVDLQWTYPGEVKGKGITMLEEIKVP |
| | SIKLVYTLTVPEATVKDSGDYECAARQATREVKEMKKVTISVHEKGFIEIKPTFSQ |
| | LEAVNLHEVKHFVVEVRAYPPPRISWLKNNLTLIENLTEITTDVEKIQEIRYRSKL |
| | KLIRAKEEDSGHYTIVAQNEDAVKSYTFELLTQVPSSILDLVDDHHGSTGGQTVRC |
| | TAEGTPLPDIEWMICKDIKKCNNETSWTILANNVSNIITEIHSRDRSTVEGRVTFA |
| | KVEETIAVRCLAKNLLGAENRELKLVAPTLRSELTVAAAVLVLLVIVIISLIVLVV |
| | IWKQKPRYEIRWRVIESISPDGHEYIYVDPMQLPYDSRWEFPRDGLVLGRVLGSGA |
| | FGKVVEGTAYGLSRSQPVMKVAVKMLKPTARSSEKQALMSELKIMTHLGPHLNIVN |
| | LLGACTKSGPIYIITEYCFYGDLVNYLHKNRDSFLSHHPEKPKKELDIFGLNPADE |
| | STRSYVIISFENNGDYMDMKQADTTQYVPMLERKEVSKYSDIQRSLYDRPASYKKK |
| | SMLDSEVKNLLSDDNSEGLTLLDLLSFTYQVARGMEFLASKNCVHRDLAARNVLLA |
| | QGKIVKICDFGLARDIMHDSNYVSKGSTFLPVKWMAPESIFDNLYTTLSDVWSYGI |
| | LLWEIFSLGGTPYPGMMVDSTFYNKIKSGYRMAKPDHATSEVYEIMVKCWNSEPEK |
| | RPSFYHLSEIVENLLPGQYKKSYEKIHLDFLKSDHPAVARMRVDSDNAYIGVTYKN |
| | EEDKLKDWEGGLDEQRLSADSGYIIPLPDIDPVPEEEDLGKRNRHSSQTSEESAIE |
| | TGSSSSTFIKREDETIEDIDMMDDIGIDSSDLVEDSFL (SEQ ID NO: 64; GenBank |
| | Accession No. NP_001334759.1) |
| Homo sapiens | MNRCWALFLSLCCYLRLVSAEGDPIPEELYEMLSDHSIRSFDDLQRLLHGDPGEED |
| PDGF beta | GAELDLNMTRSHSGGELESLARGRRSLGSLTIAEPAMIAECKTRTEVFEISRRLID |
| subunit (PDGF- | RTNANFLVWPPCVEVQRCSGCCNNRNVQCRPTQVQLRPVQVRKIEIVRKKPIFKKA |
| B), isoform 1 | TVTLEDHLACKCETVAAARPVTRSPGGSQEQRAKTPQTRVTIRTVRVRRPPKGKHR |
| preprotein | KFKHTHDKTALKETLGA (SEQ ID NO: 65; GenBank Accession No. NP_002599.1) |
| Homo sapiens | MFIMGLGDPIPEELYEMLSDHSIRSFDDLQRLLHGDPGEEDGAELDLNMTRSHSGG |
| PDGF-B, | ELESLARGRRSLGSLTIAEPAMIAECKTRTEVFEISRRLIDRTNANFLVWPPCVEV |
| isoform 2 | QRCSGCCNNRNVQCRPTQVQLRPVQVRKIEIVRKKPIFKKATVTLEDHLACKCETV |
| preprotein | AAARPVTRSPGGSQEQRAKTPQTRVTIRTVRVRRPPKGKHRKFKHTHDKTALKETL |
| | GA (SEQ ID NO: 66; GenBank Accession No. NP_148937.1) |
| Homo sapiens | MVPSAGQLALFALGIVLAACQALENSTSPLSADPPVAAAVVSHFNDCPDSHTQFCF |
| TGF-α, isoform | HGTCRFLVQEDKPACVCHSGYVGARCEHADLLAVVAASQKKQAITALVVVSIVALA |
| 1 precursor | VLIITCVLIHCCQVRKHCEWCRALICRHEKPSALLKGRTACCHSETVV (SEQ ID |
| | NO: 67; GenBank Accession No. NP_003227.1) |
| Homo sapiens | MVPSAGQLALFALGIVLAACQALENSTSPLSDPPVAAAVVSHFNDCPDSHTQFCFH |
| TGF-α, isoform | GTCRFLVQEDKPACVCHSGYVGARCEHADLLAVVAASQKKQAITALVVVSIVALAV |
| 2 precursor | LIITCVLIHCCQVRKHCEWCRALICRHEKPSALLKGRTACCHSETVV (SEQ ID |
| | NO: 68; GenBank Accession No. NP_001093161.1) |
| Homo sapiens | MFKIGRGALDLFSELLSFGGIVLAACQALENSTSPLSADPPVAAAVVSHFNDCPDS |
| TGF-α, isoform | HTQFCFHGTCRFLVQEDKPACVCHSGYVGARCEHADLLAVVAASQKKQAITALVVV |
| 3 precursor | SIVALAVLIITCVLIHCCQVRKHCEWCRALICRHEKPSALLKGRTACCHSETV |
| | (SEQ ID NO: 69; GenBank Accession No. NP_001295087.1) |
| Homo sapiens | MFKIGRGALDLFSELLSFGGIVLAACQALENSTSPLSDPPVAAAVVSHFNDCPDSH |
| TGF-α, isoform | TQFCFHGTCRFLVQEDKPACVCHSGYVGARCEHADLLAVVAASQKKQAITALVVVS |
| 4 precursor | IVALAVLIITCVLIHCCQVRKHCEWCRALICRHEKPSALLKGRTACCHSETVV |
| | (SEQ ID NO: 70; GenBank Accession No. NP_001295088.1) |
| Homo sapiens | MPPSGLRLLPLLLPLLWLLVLTPGRPAAGLSTCKTIDMELVKRKRIEATRGQILSK |
| TGF-β1, | LRLASPPSQGEVPPGPLPEAVLALYNSTRDRVAGESAEPEPEPEADYYAKEVTRVL |
| proprotein | MVETHNEIYDKFKQSTHSIYMFFNTSELREAVPEPVLLSRAELRLLRLKLKVEQHV |
| preprotein | ELYQKYSNNSWRYLSNRLLAPSDSPEWLSFDVTGVVRQWLSRGGEIEGFRLSAHCS |
| | CDSRDNTLQVDINGFTTGRRGDLATIHGMNRPFLLLMATPLERAQHLQSSRHRRAL |
| | DTNYCFSSTEKNCCVRQLYIDFRKDLGWKWIHEPKGYHANFCLGPCPYIWSLDTQY |
| | SKVLALYNQHNPGASAAPCCVPQALEPLPIVYYVGRKPKVEQLSNMIVRSCKCS |
| | (SEQ ID NO: 71; GenBank Accession No. NP_000651.3) |
| Homo sapiens | MHYCVLSAFLILHLVTVALSLSTCSTLDMDQFMRKRIEATRGQILSKLKLTSPPED |
| TGF-β2, | YPEPEEVPPEVISIYNSTRDLLQEKASRRAAACERERSDEEYYAKEVYKIDMPPFF |
| proprotein | PSETVCPVVTTPSGSVGSLCSRQSQVLCGYLDAIPPTFYRPYFRIVRFDVSAMEKN |
| isoform 1 | ASNLVKAEFRVFRLQNPKARVPEQRIELYQILKSKDLTSPTQRYIDSKVVKTRAEG |
| precursor | EWLSFDVTDAVHEWLHHKDRNLGFKISLHCPCCTFVPSNNYIIPNKSEELEARFAG |
| | IDGTSTYTSGDQKTIKSTRKKNSGKTPHLLLMLLPSYRLESQQTNRRKKRALDAAY |
| | CFRNVQDNCCLRPLYIDFKRDLGWKWIHEPKGYNANFCAGACPYLWSSDTQHSRVL |
| | SLYNTINPEASASPCCVSQDLEPLTILYYIGKTPKIEQLSNMIVKSCKCS (SEQ ID |
| | NO: 72; GenBank Accession No. NP_001129071.1) |
| Homo sapiens | MHYCVLSAFLILHLVTVALSLSTCSTLDMDQFMRKRIEATRGQILSKLKLTSPPED |
| TGF-β2, | YPEPEEVPPEVISIYNSTRDLLQEKASRRAAACERERSDEEYYAKEVYKIDMPPFF |
| proprotein | PSENAIPPTFYRPYFRIVRFDVSAMEKNASNLVKAEFRVFRLQNPKARVPEQRIEL |
| isoform 2 | YQILKSKDLTSPTQRYIDSKVVKTRAEGEWLSFDVTDAVHEWLHHKDRNLGFKISL |
| precursor | HCPCCTFVPSNNYIIPNKSEELEARFAGIDGTSTYTSGDQKTIKSTRKKNSGKTPH |
| | LLLMLLPSYRLESQQTNRRKKRALDAAYCFRNVQDNCCLRPLYIDFKRDLGWKWIH |
| | EPKGYNANFCAGACPYLWSSDTQHSRVLSLYNTINPEASASPCCVSQDLEPLTILY |
| | YIGKTPKIEQLSNMIVKSCKCS (SEQ ID NO: 73; GenBank Accession No. |
| | NP_003229.1) |
| Homo sapiens | MHLLGFFSVACSLLAAALLPGPREAPAAAAAFESGLDLSDAEPDAGEATAYASKDL |
| VEGF-C, | EEQLRSVSSVDELMTVLYPEYWKMYKCQLRKGGWQHNREQANLNSRTEETIKFAAA |
| preprotein | HYNTEILKSIDNEWRKTQCMPREVCIDVGKEFGVATNTFFKPPCVSVYRCGGCCNS |
| | EGLQCMNTSTSYLSKTLFEITVPLSQGPKPVTISFANHTSCRCMSKLDVYRQVHSI |
| | IRRSLPATLPQCQAANKTCPTNYMWNNHICRCLAQEDFMFSSDAGDDSTDGFHDIC |
| | GPNKELDEETCQCVCRAGLRPASCGPHKELDRNSCQCVCKNKLFPSQCGANREFDE |
| | NTCQCVCKRTCPRNQPLNPGKCACECTESPQKCLLKGKKFHHQTCSCYRRPCTNRQ |
| | KACEPGFSYSEEVCRCVPSYWKRPQMS (SEQ ID NO: 74; GenBank Accession No. |
| | NP_005420.1) |

Protease inhibitor

| | |
|---|---|
| Homo sapiens | MKSSGLFPFLVLLALGTLAPWAVEGSGKSFKAGVCPPKKSAQCLRYKKPECQSDWQ |
| SLPI | CPGKKRCCPDTCGIKCLDPVDTPNPTRRKPGKCPVTYGQCLMLNPPNFCEMDGQCK |
| | RDLKCCMGMCGKSCVSPVKA (SEQ ID NO: 75; GenBank Accession No. |
| | NP_003055.1) |

Cytokines

| | |
|---|---|
| Homo sapiens | MAGPATQSPMKLMALQLLLWHSALWTVQEATPLGPASSLPQSFLLKCLEQVRKIQG |
| G-CSF, isoform | DGAALQEKLVSECATYKLCHPEELVLLGHSLGIPWAPLSSCPSQALQLAGCLSQLH |
| a precursor | SGLFLYQGLLQALEGISPELGPTLDTLQLDVADFATTIWQQMEELGMAPALQPTQG |
| | AMPAFASAFQRRAGGVLVASHLQS FLEVSYRVLRHLAQP (SEQ ID NO: 76; |
| | GenBank Accession No. NP_000750.1) |
| Homo sapiens | MAGPATQSPMKLMALQLLLWHSALWTVQEATPLGPASSLPQSFLLKCLEQVRKIQG |
| G-CSF, isoform | DGAALQEKLCATYKLCHPEELVLLGHSLGIPWAPLSSCPSQALQLAGCLSQLHSGL |
| b precursor | FLYQGLLQALEGISPELGPTLDTLQLDVADFATTIWQQMEELGMAPALQPTQGAMP |
| | AFASAFQRRAGGVLVASHLQSFLEVSYRVLRHLAQP (SEQ ID NO: 77; GenBank |
| | Accession No. NP_757373.1) |
| Homo sapiens | MAGPATQSPMKLMALQLLLWHSALWTVQEATPLGPASSLPQSFLLKCLEQVRKIQG |
| G-CSF, isoform | DGAALQEKLVSEAGCLSQLHSGLFLYQGLLQALEGISPELGPTLDTLQLDVADFAT |
| c precursor | TIWQQMEELGMAPALQPTQGAMPAFASAFQRRAGGVLVASHLQSFLEVSYRVLRHL |
| | AQP (SEQ ID NO: 78; GenBank Accession No. NP_757374.2) |
| Homo sapiens | MAGPATQSPMKLMALQLLLWHSALWTVQEATPLGPASSLPQSFLLKCLEQVRKIQG |
| G-CSF, isoform | DGAALQEKLAGCLSQLHSGLFLYQGLLQALEGISPELGPTLDTLQLDVADFATTIW |
| d precursor | QQMEELGMAPALQPTQGAMPAFASAFQRRAGGVLVASHLQSFLEVSYRVLRHLAQP |
| | (SEQ ID NO: 79; GenBank Accession No. NP_001171618.1) |
| Homo sapiens | MWLQSLLLLGTVACSISAPARSPSPSTQPWEHVNAIQEARRLLNLSRDTAAEMNET |
| GM-CSF, | VEVISEMFDLQEPTCLQTRLELYKQGLRGSLTKLKGPLTMMASHYKQHCPPTPETS |
| precursor | CATQIITFESFKENLKDFLLVIPFDCWEPVQE (SEQ ID NO: 80; GenBank |
| | Accession No. NP_000749.2) |
| Homo sapiens | MWVTKLLPALLLQHVLLHLLLLPTATPYAEGQRKRRNTIHEFKKSAKTTLIKIDPA |
| HGF, isoform 1 | LKIKTKKVNTADQCANRCTRNKGLPFTCKAFVFDKARKQCLWFPFNSMSSGVKKEF |
| precursor | GHEFDLYENKDYIRNCIIGKGRSYKGTVSITKSGIKCQPWSSMIPHEHSFLPSSYR |
| | GKDLQENYCRNPRGEEGGPWCFTSNPEVRYEVCDIPQCSEVECMTCNGESYRGLMD |
| | HTESGKICQRWDHQTPHRHKFLPERYPDKGFDDNYCRNPDGQPRPWCYTLDPHTRW |
| | EYCAIKTCADNTMNDTDVPLETTECIQGQGEGYRGTVNTIWNGIPCQRWDSQYPHE |
| | HDMTPENFKCKDLRENYCRNPDGSESPWCFTTDPNIRVGYCSQIPNCDMSHGQDCY |
| | RGNGKNYMGNLSQTRSGLTCSMWDKNMEDLHRHIFWEPDASKLNENYCRNPDDDAH |
| | GPWCYTGNPLIPWDYCPISRCEGDTTPTIVNLDHPVISCAKTKQLRVVNGIPTRTN |
| | IGWMVSLRYRNKHICGGSLIKESWVLTARQCFPSRDLKDYEAWLGIHDVHGRGDEK |
| | CKQVLNVSQLVYGPEGSDLVLMKLARPAVLDDFVSTIDLPNYGCTIPEKTSCSVYG |
| | WGYTGLINYDGLLRVAHLYIMGNEKCSQHHRGKVTLNESEICAGAEKIGSGPCEGD |
| | YGGPLVCEQHKMRMVLGVIVPGRGCAIPNRPGIFVRVAYYAKWIHKIILTYKVPQS |
| | (SEQ ID NO: 81; GenBank Accession No. NP_000592.3) |
| Homo sapiens | MWVTKLLPALLLQHVLLHLLLLPTATPYAEGQRKRRNTIHEFKKSAKTTLIKIDPA |
| HGF, isoform 2 | LKIKTKKVNTADQCANRCTRNKGLPFTCKAFVFDKARKQCLWFPFNSMSSGVKKEF |
| precursor | GHEFDLYENKDYIRNCIIGKGRSYKGTVSITKSGIKCQPWSSMIPHEHSFLPSSYR |
| | GKDLQENYCRNPRGEEGGPWCFTSNPEVRYEVCDIPQCSEVECMTCNGESYRGLMD |
| | HTESGKICQRWDHQTPHRHKFLPERYPDKGFDDNYCRNPDGQPRPWCYTLDPHTRW |
| | EYCAIKTCET (SEQ ID NO: 82; GenBank Accession No. NP_001010931.1) |
| Homo sapiens | MWVTKLLPALLLQHVLLHLLLLPTATPYAEGQRKRRNTIHEFKKSAKTTLIKIDPA |
| HGF, isoform 3 | LKIKTKKVNTADQCANRCTRNKGLPFTCKAFVFDKARKQCLWFPFNSMSSGVKKEF |
| precursor | GHEFDLYENKDYIRNCIIGKGRSYKGTVSITKSGIKCQPWSSMIPHEHSYRGKDLQ |
| | ENYCRNPRGEEGGPWCFTSNPEVRYEVCDIPQCSEVECMTCNGESYRGLMDHTESG |
| | KICQRWDHQTPHRHKFLPERYPDKGFDDNYCRNPDGQPRPWCYTLDPHTRWEYCAI |
| | KTCADNTMNDTDVPLETTECIQGQGEGYRGTVNTIWNGIPCQRWDSQYPHEHDMTP |
| | ENFKCKDLRENYCRNPDGSESPWCFTTDPNIRVGYCSQIPNCDMSHGQDCYRGNGK |
| | NYMGNLSQTRSGLTCSMWDKNMEDLHRHIFWEPDASKLNENYCRNPDDDAHGPWCY |
| | TGNPLIPWDYCPISRCEGDTTPTIVNLDHPVISCAKTKQLRVVNGIPTRTNIGWMV |
| | SLRYRNKHICGGSLIKESWVLTARQCFPSRDLKDYEAWLGIHDVHGRGDEKCKQVL |
| | NVSQLVYGPEGSDLVLMKLARPAVLDDFVSTIDLPNYGCTIPEKTSCSVYGWGYTG |
| | LINYDGLLRVAHLYIMGNEKCSQHHRGKVTLNESEICAGAEKIGSGPCEGDYGGPL |
| | VCEQHKMRMVLGVIVPGRGCAIPNRPGIFVRVAYYAKWIHKIILTYKVPQS (SEQ |
| | ID NO: 83; GenBank Accession No. NP_001010932.1) |
| Homo sapiens | MWVTKLLPALLLQHVLLHLLLLPTATPYAEGQRKRRNTIHEFKKSAKTTLIKIDPA |
| HGF, isoform 4 | LKIKTKKVNTADQCANRCTRNKGLPFTCKAFVFDKARKQCLWFPFNSMSSGVKKEF |
| precursor | GHEFDLYENKDYIRNCIIGKGRSYKGTVSITKSGIKCQPWSSMIPHEHSYRGKDLQ |
| | ENYCRNPRGEEGGPWCFTSNPEVRYEVCDIPQCSEVECMTCNGESYRGLMDHTESG |
| | KICQRWDHQTPHRHKFLPERYPDKGFDDNYCRNPDGQPRPWCYTLDPHTRWEYCAI |
| | KTCET (SEQ ID NO: 84; GenBank Accession No. NP_001010933.1) |
| Homo sapiens | MWVTKLLPALLLQHVLLHLLLLPIAIPYAEGQRKRRNTIHEFKKSAKTTLIKIDPA |
| HGF, isoform 5 | LKIKTKKVNTADQCANRCTRNKGLPFTCKAFVFDKARKQCLWFPFNSMSSGVKKEF |
| precursor | GHEFDLYENKDYIRNCIIGKGRSYKGTVSITKSGIKCQPWSSMIPHEHSFLPSSYR |
| | GKDLQENYCRNPRGEEGGPWCFTSNPEVRYEVCDIPQCSEGK (SEQ ID NO: 197; |
| | GenBank Accession No. NP_001010934.1) |
| Homo sapiens | MAKVPDMFEDLKNCYSENEEDSSSIDHLSLNQKSFYHVSYGPLHEGCMDQSVSLSI |
| IL-1, alpha | SETSKTSKLTFKESMVVVATNGKVLKKRRLSLSQSITDDDLEAIANDSEEEIIKPR |
| | SAPFSFLSNVKYNFMRIIKYEFILNDALNQSIIRANDQYLTAAALHNLDEAVKFDM |
| | GAYKSSKDDAKITVIIRISKTQLYVTAQDEDQPVLLKEMPEIPKTITGSETNLLFF |
| | WETHGTKNYFTSVAHPNLFIATKQDYWVCLAGGPPSITDFQILENQA (SEQ ID |
| | NO: 198; GenBank Accession No. NP_000566.3) |
| Homo sapiens | MAEVPELASEMMAYYSGNEDDLFFEADGPKQMKCSFQDLDLCPLDGGIQLRISDHH |
| IL-1, beta | YSKGFRQAASVVVAMDKLRKMLVPCPQTFQENDLSTFFPFIFEEEPIFFDTWDNEA |
| | YVHDAPVRSLNCTLRDSQQKSLVMSGPYELKALHLQGQDMEQQVVFSMSFVQGEES |
| | NDKIPVALGLKEKNLYLSCVLKDDKPTLQLESVDPKNYPKKKMEKRFVFNKIEINN |
| | KLEFESAQFPNWYISTSQAENMPVFLGGTKGGQDITDFTMQFVSS (SEQ ID |
| | NO: 199; GenBank Accession No. NP_000567.1) |
| Homo sapiens | MNSFSTSAFGPVAFSLGLLLVLPAAFPAPVPPGEDSKDVAAPHRQPLTSSERIDKQ |
| IL-6, isoform 1 | IRYILDGISALRKETCNKSNMCESSKEALAENNLNLPKMAEKDGCFQSGFNEETCL |
| | VKIITGLLEFEVYLEYLQNRFESSEEQARAVQMSTKVLIQFLQKKAKNLDAITTPD |
| | PTTNASLLTKLQAQNQWLQDMTTHLILRSFKEFLQSSLRALRQM (SEQ ID NO: 200; |
| | GenBank Accession No. NP_000591.1) |
| Homo sapiens | MCESSKEALAENNLNLPKMAEKDGCFQSGFNEETCLVKIITGLLEFEVYLEYLQNR |
| IL-6, isoform 2 | FESSEEQARAVQMSTKVLIQFLQKKAKNLDAITTPDPTTNASLLTKLQAQNQWLQD |
| | MTTHLILRSFKEFLQSSLRALRQM (SEQ ID NO: 201; GenBank Accession No. |
| | NP_001305024.1) |
| Homo sapiens | MTSKLAVALLAAFLISAALCEGAVLPRSAKELRCQCIKTYSKPFHPKFIKELRVIE |
| IL-8, isoform 1 | SGPHCANTEIIVKLSDGRELCLDPKENWVQRVVEKFLKRAENS (SEQ ID NO: 202; |
| precursor | GenBank Accession No. NP_000575.1) |
| Homo sapiens | MTSKLAVALLAAFLISAALCEGAVLPRSAKELRCQCIKTYSKPFHPKFIKELRVIE |
| IL-8, isoform 2 | SGPHCANTEIIVKLSDGRELCLDPKENWVQRVVEKFLKR (SEQ ID NO: 203; |
| precursor | GenBank Accession No. NP_001341769.1) |
| Homo sapiens | MHSSALLCCLVLLTGVRASPGQGTQSENSCTHFPGNLPNMLRDLRDAFSRVKTFFQ |
| IL-10, precursor | MKDQLDNLLLKESLLEDFKGYLGCQALSEMIQFYLEEVMPQAENQDPDIKAHVNSL |
| | GENLKTLRLRLRRCHRFLPCENKSKAVEQVKNAFNKLQEKGIYKAMSEFDIFINYI |
| | EAYMTMKIRN (SEQ ID NO: 204; GenBank Accession No. NP_000563.1) |
| Homo sapiens | MSTESMIRDVELAEEALPKKTGGPQGSRRCLFLSLFSFLIVAGATTLFCLLHFGVI |
| TNF-alpha | GPQREEFPRDLSLISPLAQAVRSSSRTPSDKPVAHVVANPQAEGQLQWLNRRANAL |
| | LANGVELRDNQLVVPSEGLYLIYSQVLFKGQGCPSTHVLLTHTISRIAVSYQTKVN |
| | LLSAIKSPCQRETPEGAEAKPWYEPIYLGGVFQLEKGDRLSAEINRPDYLDFAESG |
| | QVYFGIIAL (SEQ ID NO: 205; GenBank Accession No. NP_000585.2) |

Chemokines

| | |
|---|---|
| Homo sapiens | MKVSAALLCLLLIAATFIPQGLAQPDAINAPVTCCYNFTNRKISVQRLASYRRITS |
| MCP-1 | SKCPKEAVIFKTIVAKEICADPKQKWVQDSMDHLDKQTQTPKT (SEQ ID NO: 206; |
| | GenBank Accession No. NP_002973.1) |
| Homo sapiens | MNAKVVVVLVLVLTALCLSDGKPVSLSYRCPCRFFESHVARANVKHLKILNTPNCA |
| SDF-1, isoform | LQIVARLKNNNRQVCIDPKLKWIQEYLEKALNK (SEQ ID NO: 207; GenBank |
| alpha precursor | Accession No. NP_954637.1) |
| Homo sapiens | MNAKVVVVLVLVLTALCLSDGKPVSLSYRCPCRFFESHVARANVKHLKILNTPNCA |
| SDF-1, isoform | LQIVARLKNNNRQVCIDPKLKWIQEYLEKALNKRFKM (SEQ ID NO: 208; GenBank |
| beta precursor | Accession No. NP_000600.1) |
| Homo sapiens | MNAKVVVVLVLVLTALCLSDGKPVSLSYRCPCRFFESHVARANVKHLKILNTPNCA |
| SDF-1, isoform | LQIVARLKNNNRQVCIDPKLKWIQEYLEKALNNLISAAPAGKRVIAGARALHPSPP |
| delta precursor | RACPTARALCEIRLWPPPEWSWPSPGDV (SEQ ID NO: 209; GenBank Accession |
| | No. NP_001171605.1) |
| Homo sapiens | MNAKVVVVLVLVLTALCLSDGKPVSLSYRCPCRFFESHVARANVKHLKILNTPNCA |
| SDF-1, isoform | LQIVARLKNNNRQVCIDPKLKWIQEYLEKALNKGRREEKVGKKEKIGKKKRQKKRK |
| gamma precursor | AAQKRKN (SEQ ID NO: 210; GenBank Accession No. NP_001029058.1) |
| Homo sapiens | MNAKVVVVLVLVLTALCLSDGKPVSLSYRCPCRFFESHYCTCLIRVSFHGATPLTQ |
| SDF-1, isoform | GSWVLYSLSCAGGETGLREPGPMVSPRVESHQEGRLGVPGPVNLGKA (SEQ ID |
| 5 precursor | NO: 211; GenBank Accession No. NP_001264919.1) |

Collagens

| | |
|---|---|
| Homo sapiens | MFSFVDLRLLLLLAATALLTHGQEEGQVEGQDEDIPPITCVQNGLRYHDRDVWKPE |
| collagen type I, | PCRICVCDNGKVLCDDVICDETKNCPGAEVPEGECCPVCPDGSESPTDQETTGVEG |
| alpha 1 chain | PKGDTGPRGPRGPAGPPGRDGIPGQPGLPGPPGPPGPPGPPGLGGNFAPQLSYGYD |
| (COL1A1) | EKSTGGISVPGPMGPSGPRGLPGPPGAPGPQGFQGPPGEPGEPGASGPMGPRGPPG |
| precursor | PPGKNGDDGEAGKPGRPGERGPPGPQGARGLPGTAGLPGMKGHRGFSGLDGAKGDA |
| | GPAGPKGEPGSPGENGAPGQMGPRGLPGERGRPGAPGPAGARGNDGATGAAGPPGP |
| | TGPAGPPGFPGAVGAKGEAGPQGPRGSEGPQGVRGEPGPPGPAGAAGPAGNPGADG |
| | QPGAKGANGAPGIAGAPGFPGARGPSGPQGPGGPPGPKGNSGEPGAPGSKGDTGAK |
| | GEPGPVGVQGPPGPAGEEGKRGARGEPGPTGLPGPPGERGGPGSRGFPGADGVAGP |
| | KGPAGERGSPGPAGPKGSPGEAGRPGEAGLPGAKGLTGSPGSPGPDGKTGPPGPAG |
| | QDGRPGPPGPPGARGQAGVMGFPGPKGAAGEPGKAGERGVPGPPGAVGPAGKDGEA |
| | GAQGPPGPAGPAGERGEQGPAGSPGFQGLPGPAGPPGEAGKPGEQGVPGDLGAPGP |
| | SGARGERGFPGERGVQGPPGPAGPRGANGAPGNDGAKGDAGAPGAPGSQGAPGLQG |
| | MPGERGAAGLPGPKGDRGDAGPKGADGSPGKDGVRGLTGPIGPPGPAGAPGDKGES |
| | GPSGPAGPTGARGAPGDRGEPGPPGPAGFAGPPGADGQPGAKGEPGDAGAKGDAGP |
| | PGPAGPAGPPGPIGNVGAPGAKGARGSAGPPGATGFPGAAGRVGPPGPSGNAGPPG |
| | PPGPAGKEGGKGPRGETGPAGRPGEVGPPGPPGPAGEKGSPGADGPAGAPGTPGPQ |
| | GIAGQRGVVGLPGQRGERGFPGLPGPSGEPGKQGPSGASGERGPPGPMGPPGLAGP |
| | PGESGREGAPGAEGSPGRDGSPGAKGDRGETGPAGPPGAPGAPGAPGPVGPAGKSG |
| | DRGET (SEQ ID NO: 213; GenBank Accession No. CAA67261.1) |
| Homo sapiens | MLSFVDTRTLLLLAVTLCLATCQSLQEETVRKGPAGDRGPRGERGPPGPPGRDGED |
| collagen type I, | GPTGPPGPPGPPGPPGLGGNFAAQYDGKGVGLGPGPMGLMGPRGPPGAAGAPGPQG |
| alpha 2 chain | FQGPAGEPGEPGQTGPAGARGPAGPPGKAGEDGHPGKPGRPGERGVVGPQGARGFP |
| (COL1A2) | GTPGLPGFKGIRGHNGLDGLKGQPGAPGVKGEPGAPGENGTPGQTGARGLPGERGR |
| precursor | VGAPGPAGARGSDGSVGPVGPAGPIGSAGPPGFPGAPGPKGEIGAVGNAGPAGPAG |
| | PRGEVGLPGLSGPVGPPGNPGANGLTGAKGAAGLPGVAGAPGLPGPRGIPGPVGAA |
| | GATGARGLVGEPGPAGSKGESGNKGEPGSAGPQGPPGPSGEEGKRGPNGEAGSAGP |
| | PGPPGLRGSPGSRGLPGADGRAGVMGPPGSRGASGPAGVRGPNGDAGRPGEPGLMG |
| | PRGLPGSPGNIGPAGKEGPVGLPGIDGRPGPIGPAGARGEPGNIGFPGPKGPTGDP |
| | GKNGDKGHAGLAGARGAPGPDGNNGAQGPPGPQGVQGGKGEQGPPGPPGFQGLPGP |
| | SGPAGEVGKPGERGLHGEFGLPGPAGPRGERGPPGESGAAGPTGPIGSRGPSGPPG |
| | PDGNKGEPGVVGAVGTAGPSGPSGLPGERGAAGIPGGKGEKGEPGLRGEIGNPGRD |
| | GARGAPGAVGAPGPAGATGDRGEAGAAGPAGPAGPRGSPGERGEVGPAGPNGFAGP |
| | AGAAGQPGAKGERGAKGPKGENGVVGPTGPVGAAGPAGPNGPPGPAGSRGDGGPPG |
| | MTGFPGAAGRTGPPGPSGISGPPGPPGPAGKEGLRGPRGDQGPVGRTGEVGAVGPP |
| | GFAGEKGPSGEAGTAGPPGTPGPQGLLGAPGILGLPGSRGERGLPGVAGAVGEPGP |
| | LGIAGPPGARGPPGAVGSPGVNGAPGEAGRDGNPGNDGPPGRDGQPGHKGERGYPG |
| | NIGPVGAAGAPGPHGPVGPAGKHGNRGETGPSGPVGPAGAVGPRGPSGPQGIRGDK |
| | GEPGEKGPRGLPGLKGHNGLQGLPGIAGHHGDQGAPGSVGPAGPRGPAGPSGPAGK |
| | DGRTGHPGTVGPAGIRGPQGHQGPAGPPGPPGPPGPPGVSGGGYDFGYDGDFYRAD |
| | QPRSAPSLRPKDYEVDATLKSLNNQIETLLTPEGSRKNPARTCRDLRLSHPEWSSG |
| | YYWIDPNQGCTMDAIKVYCDFSTGETCIRAQPENIPAKNWYRSSKDKKHVWLGETI |
| | NAGSQFEYNVEGVTSKEMATQLAFMRLLANYASQNITYHCKNSIAYMDEETGNLKK |
| | AVILQGSNDVELVAEGNSRFTYTVLVDGCSKKTNEWGKTIIEYKTNKPSRLPFLDI |
| | APLDIGGADQEFFVDIGPVCFK (SEQ ID NO: 214; GenBank Accession No. |
| | NP_000080.2) |
| Homo sapiens | MMSFVQKGSWLLLALLHPTIILAQQEAVEGGCSHLGQSYADRDVWKPEPCQICVCD |
| collagen type III, | SGSVLCDDIICDDQELDCPNPEIPFGECCAVCPQPPTAPTRPPNGQGPQGPKGDPG |
| alpha chain type | PPGIPGRNGDPGIPGQPGSPGSPGPPGICESCPTGPQNYSPQYDSYDVKSGVAVGG |
| 1 (COL3A1) | LAGYPGPAGPPGPPGPPGTSGHPGSPGSPGYQGPPGEPGQAGPSGPPGPPGAIGPS |
| | GPAGKDGESGRPGRPGERGLPGPPGIKGPAGIPGFPGMKGHRGFDGRNGEKGETGA |
| | PGLKGENGLPGENGAPGPMGPRGAPGERGRPGLPGAAGARGNDGARGSDGQPGPPG |
| | PPGTAGFPGSPGAKGEVGPAGSPGSNGAPGQRGEPGPQGHAGAQGPPGPPGINGSP |
| | GGKGEMGPAGIPGAPGLMGARGPPGPAGANGAPGLRGGAGEPGKNGAKGEPGPRGE |
| | RGEAGIPGVPGAKGEDGKDGSPGEPGANGLPGAAGERGAPGFRGPAGPNGIPGEKG |
| | PAGERGAPGPAGPRGAAGEPGRDGVPGGPGMRGMPGSPGGPGSDGKPGPPGSQGES |
| | GRPGPPGPSGPRGQPGVMGFPGPKGNDGAPGKNGERGGPGGPGPQGPPGKNGETGP |
| | QGPPGPTGPGGDKGDTGPPGPQGLQGLPGTGGPPGENGKPGEPGPKGDAGAPGAPG |
| | GKGDAGAPGERGPPGLAGAPGLRGGAGPPGPEGGKGAAGPPGPPGAAGTPGLQGMP |
| | GERGGLGSPGPKGDKGEPGGPGADGVPGKDGPRGPTGPIGPPGPAGQPGDKGEGGA |
| | PGLPGIAGPRGSPGERGETGPPGPAGFPGAPGQNGEPGGKGERGAPGEKGEGGPPG |
| | VAGPPGGSGPAGPPGPQGVKGERGSPGGPGAAGFPGARGLPGPPGSNGNPGPPGPS |
| | GSPGKDGPPGPAGNTGAPGSPGVSGPKGDAGQPGEKGSPGAQGPPGAPGPLGIAGI |
| | TGARGLAGPPGMPGPRGSPGPQGVKGESGKPGANGLSGERGPPGPQGLPGLAGTAG |
| | EPGRDGNPGSDGLPGRDGSPGGKGDRGENGSPGAPGAPGHPGPPGPVGPAGKSGDR |
| | GESGPAGPAGAPGPAGSRGAPGPQGPRGDKGETGERGAAGIKGHRGFPGNPGAPGS |
| | PGPAGQQGAIGSPGPAGPRGPVGPSGPPGKDGTSGHPGPIGPPGPRGNRGERGSEG |
| | SPGHPGQPGPPGPPGAPGPCCGGVGAAAIAGIGGEKAGGFAPYYGDEPMDFKINTD |
| | EIMTSLKSVNGQIESLISPDGSRKNPARNCRDLKFCHPELKSGEYWVDPNQGCKLD |
| | AIKVFCNMETGETCISANPLNVPRKHWWTDSSAEKKHVWFGESMDGGFQFSYGNPE |
| | LPEDVLDVHLAFLRLLSSRASQNITYHCKNSIAYMDQASGNVKKALKLMGSNEGEF |
| | KAEGNSKFTYTVLEDGCTKHTGEWSKTVFEYRTRKAVRLPIVDIAPYDIGGPDQEF |
| | GVDVGPVCFL (SEQ ID NO: 215; GenBank Accession No. NP_000081.1) |
| Homo sapiens | MGPRLSVWLLLLPAALLLHEEHSRAAAKGGCAGSGCGKCDCHGVKGQKGERGLPGL |
| collagen type IV, | QGVIGFPGMQGPEGPQGPPGQKGDTGEPGLPGTKGTRGPPGASGYPGNPGLPGIPG |
| alpha chain 1 | QDGPPGPPGIPGCNGTKGERGPLGPPGLPGFAGNPGPPGLPGMKGDPGEILGHVPG |
| (COL4A1) | MLLKGERGFPGIPGTPGPPGLPGLQGPVGPPGFTGPPGPPGPPGPPGEKGQMGLSF |
| isoform 1 | QGPKGDKGDQGVSGPPGVPGQAQVQEKGDFATKGEKGQKGEPGFQGMPGVGEKGEP |
| preprotein | GKPGPRGKPGKDGDKGEKGSPGFPGEPGYPGLIGRQGPQGEKGEAGPPGPPGIVIG |
| | TGPLGEKGERGYPGTPGPRGEPGPKGFPGLPGQPGPPGLPVPGQAGAPGFPGERGE |
| | KGDRGFPGTSLPGPSGRDGLPGPPGSPGPPGQPGYTNGIVECQPGPPGDQGPPGIP |
| | GQPGFIGEIGEKGQKGESCLICDIDGYRGPPGPQGPPGEIGFPGQPGAKGDRGLPG |
| | RDGVAGVPGPQGTPGLIGQPGAKGEPGEFYFDLRLKGDKGDPGFPGQPGMPGRAGS |
| | PGRDGHPGLPGPKGSPGSVGLKGERGPPGGVGFPGSRGDTGPPGPPGYGPAGPIGD |
| | KGQAGFPGGPGSPGLPGPKGEPGKIVPLPGPPGAEGLPGSPGFPGPQGDRGFPGTP |
| | GRPGLPGEKGAVGQPGIGFPGPPGPKGVDGLPGDMGPPGTPGRPGFNGLPGNPGVQ |
| | GQKGEPGVGLPGLKGLPGLPGIPGTPGEKGSIGVPGVPGEHGAIGPPGLQGIRGEP |
| | GPPGLPGSVGSPGVPGIGPPGARGPPGGQGPPGLSGPPGIKGEKGFPGFPGLDMPG |
| | PKGDKGAQGLPGITGQSGLPGLPGQQGAPGIPGFPGSKGEMGVMGTPGQPGSPGPV |
| | GAPGLPGEKGDHGFPGSSGPRGDPGLKGDKGDVGLPGKPGSMDKVDMGSMKGQKGD |
| | QGEKGQIGPIGEKGSRGDPGTPGVPGKDGQAGQPGQPGPKGDPGISGTPGAPGLPG |
| | PKGSVGGMGLPGTPGEKGVPGIPGPQGSPGLPGDKGAKGEKGQAGPPGIGIPGLRG |
| | EKGDQGIAGFPGSPGEKGEKGSIGIPGMPGSPGLKGSPGSVGYPGSPGLPGEKGDK |
| | GLPGLDGIPGVKGEAGLPGTPGPTGPAGQKGEPGSDGIPGSAGEKGEPGLPGRGFP |
| | GFPGAKGDKGSKGEVGFPGLAGSPGIPGSKGEQGFMGPPGPQGQPGLPGSPGHATE |
| | GPKGDRGPQGQPGLPGLPGPMGPPGLPGIDGVKGDKGNPGWPGAPGVPGPKGDPGF |
| | QGMPGIGGSPGITGSKGDMGPPGVPGFQGPKGLPGLQGIKGDQGDQGVPGAKGLPG |
| | PPGPPGPYDIIKGEPGLPGPEGPPGLKGLQGLPGPKGQQGVTGLVGIPGPPGIPGF |
| | DGAPGQKGEMGPAGPTGPRGFPGPPGPDGLPGSMGPPGTPSVDHGFLVTRHSQTID |
| | DPQCPSGTKILYHGYSLLYVQGNERAHGQDLGTAGSCLRKFSTMPFLFCNINNVCN |
| | FASRNDYSYWLSTPEPMPMSMAPITGENIRPFISRCAVCEAPAMVMAVHSQTIQIP |
| | PCPSGWSSLWIGYSFVMHTSAGAEGSGQALASPGSCLEEFRSAPFIECHGRGTCNY |
| | YANAYSFWLATIERSEMFKKPTPSTLKAGELRTHVSRCQVCMRRT (SEQ ID |
| | NO: 216; GenBank Accession No. NP_001836.3) |
| Homo sapiens | MGRDQRAVAGPALRRWLLLGTVTVGFLAQSVLAGVKKFDVPCGGRDCSGGCQCYPE |
| collagen type IV, | KGGRGQPGPVGPQGYNGPPGLQGFPGLQGRKGDKGERGAPGVTGPKGDVGARGVSG |
| alpha chain 2 | FPGADGIPGHPGQGGPRGRPGYDGCNGTQGDSGPQGPPGSEGFTGPPGPQGPKGQK |
| (COL4A2), | GEPYALPKEERDRYRGEPGEPGLVGFQGPPGRPGHVGQMGPVGAPGRPGPPGPPGP |
| isoform 1 | KGQQGNRGLGFYGVKGEKGDVGQPGPNGIPSDTLHPIIAPTGVTFHPDQYKGEKGS |
| preprotein | EGEPGIRGISLKGEEGIMGFPGLRGYPGLSGEKGSPGQKGSRGLDGYQGPDGPRGP |
| | KGEAGDPGPPGLPAYSPHPSLAKGARGDPGFPGAQGEPGSQGEPGDPGLPGPPGLS |
| | IGDGDQRRGLPGEMGPKGFIGDPGIPALYGGPPGPDGKRGPPGPPGLPGPPGPDGF |
| | LFGLKGAKGRAGFPGLPGSPGARGPKGWKGDAGECRCTEGDEAIKGLPGLPGPKGF |
| | AGINGEPGRKGDRGDPGQHGLPGFPGLKGVPGNIGAPGPKGAKGDSRTITTKGERG |
| | QPGVPGVPGMKGDDGSPGRDGLDGFPGLPGPPGDGIKGPPGDPGYPGIPGTKGTPG |
| | EMGPPGLGLPGLKGQRGFPGDAGLPGPPGFLGPPGPAGTPGQIDCDTDVKRAVGGD |
| | RQEAIQPGCIGGPKGLPGLPGPPGPTGAKGLRGIPGFAGADGGPGPRGLPGDAGRE |
| | GFPGPPGFIGPRGSKGAVGLPGPDGSPGPIGLPGPDGPPGERGLPGEVLGAQPGPR |
| | GDAGVPGQPGLKGLPGDRGPPGFRGSQGMPGMPGLKGQPGLPGPSGQPGLYGPPGL |
| | HGFPGAPGQEGPLGLPGIPGREGLPGDRGDPGDTGAPGPVGMKGLSGDRGDAGFTG |
| | EQGHPGSPGFKGIDGMPGTPGLKGDRGSPGMDGFQGMPGLKGRPGFPGSKGEAGFF |
| | GIPGLKGLAGEPGFKGSRGDPGPPGPPPVILPGMKDIKGEKGDEGPMGLKGYLGAK |
| | GIQGMPGIPGLSGIPGLPGRPGHIKGVKGDIGVPGIPGLPGFPGVAGPPGITGFPG |
| | FIGSRGDKGAPGRAGLYGEIGATGDFGDIGDTINLPGRPGLKGERGTTGIPGLKGF |
| | FGEKGTEGDIGFPGITGVTGVQGPPGLKGQTGFPGLTGPPGSQGELGRIGLPGGKG |
| | DDGWPGAPGLPGFPGLRGIRGLHGLPGTKGFPGSPGSDIHGDPGFPGPPGERGDPG |
| | EANTLPGPVGVPGQKGDQGAPGERGPPGSPGLQGFPGITPPSNISGAPGDKGAPGI |
| | FGLKGYRGPPGPPGSAALPGSKGDTGNPGAPGTPGTKGWAGDSGPQGRPGVFGLPG |
| | EKGPRGEQGFMGNTGPTGAVGDRGPKGPKGDPGFPGAPGTVGAPGIAGIPQKIAVQ |
| | PGTVGPQGRRGPPGAPGEMGPQGPPGEPGFRGAPGKAGPQGRGGVSAVPGFRGDEG |
| | PIGHQGPIGQEGAPGRPGSPGLPGMPGRSVSIGYLLVKHSQTDQEPMCPVGMNKLW |
| | SGYSLLYFEGQEKAHNQDLGLAGSCLARFSTMPFLYCNPGDVCYYASRNDKSYWLS |
| | TTAPLPMMPVAEDEIKPYISRCSVCEAPAIAIAVHSQDVSIPHCPAGWRSLWIGYS |
| | FLMHTAAGDEGGGQSLVSPGSCLEDFRATPFIECNGGRGTCHYYANKYSFWLTTIP |
| | EQSFQGSPSADTLKAGLIRTHISRCQVCMKNL (SEQ ID NO: 217; GenBank |
| | Accession No. NP_0018372) |
| Homo sapiens | MGPRLSVWLLLLPAALLLHEEHSRAAAKGGCAGSGCGKCDCHGVKGQKGERGLPGL |
| collagen type IV, | QGVIGFPGMQGPEGPQGPPGQKGDTGEPGLPGTKGTRGPPGASGYPGNPGLPGIPG |
| alpha chain 1 | QDGPPGPPGIPGCNGTKGERGPLGPPGLPGFAGNPGPPGLPGMKGDPGEILGHVPG |
| (COL4A1), | MLLKGERGFPGIPGTPGPPGLPGLQGPVGPPGFTGPPGPPGPPGPPGEKGQMGLSF |
| isoform 1 | QGPKGDKGDQGVSGPPGVPGQAQVQEKGDFATKGEKGQKGEPGFQGMPGVGEKGEP |
| preprotein | GKPGPRGKPGKDGDKGEKGSPGFPGEPGYPGLIGRQGPQGEKGEAGPPGPPGIVIG |
| | TGPLGEKGERGYPGTPGPRGEPGPKGFPGLPGQPGPPGLPVPGQAGAPGFPGERGE |
| | KGDRGFPGTSLPGPSGRDGLPGPPGSPGPPGQPGYTNGIVECQPGPPGDQGPPGIP |
| | GQPGFIGEIGEKGQKGESCLICDIDGYRGPPGPQGPPGEIGFPGQPGAKGDRGLPG |
| | RDGVAGVPLLFQIHK (SEQ ID NO: 255; GenBank Accession No. |
| | NP_0012900391) |
| Homo sapiens | MDVHTRWKARSALRPGAPLLPPLLLLLLWAPPPSRAAQPADLLKVLDFHNLPDGIT |
| collagen type V, | KTTGFCATRRSSKGPDVAYRVTKDAQLSAPTKQLYPASAFPEDFSILTTVKAKKGS |
| alpha chain 1 | QAFLVSIYNEQGIQQIGLELGRSPVFLYEDHTGKPGPEDYPLFRGINLSDGKWHRI |
| (COL5A1), | ALSVHKKNVTLILDCKKKTTKFLDRSDHPMIDINGIIVFGTRILDEEVFEGDIQQL |
| isoform 1 | LFVSDHRAAYDYCEHYSPDCDTAVPDTPQSQDPNPDEYYTEGDGEGETYYYEYPYY |
| preprotein | EDPEDLGKEPTPSKKPVEAAKETTEVPEELTPTPTEAAPMPETSEGAGKEEDVGIG |
| | DYDYVPSEDYYTPSPYDDLTYGEGEENPDQPTDPGAGAEIPTSTADTSNSSNPAPP |
| | PGEGADDLEGEFTEETIRNLDENYYDPYYDPTSSPSEIGPGMPANQDTIYEGIGGP |
| | RGEKGQKGEPAIIEPGMLIEGPPGPEGPAGLPGPPGTMGPTGQVGDPGERGPPGRP |
| | GLPGADGLPGPPGTMLMLPFRFGGGGDAGSKGPMVSAQESQAQAILQQARLALRGP |
| | AGPMGLTGRPGPVGPPGSGGLKGEPGDVGPQGPRGVQGPPGPAGKPGRRGRAGSDG |
| | ARGMPGQTGPKGDRGFDGLAGLPGEKGHRGDPGPSGPPGPPGDDGERGDDGEVGPR |
| | GLPGEPGPRGLLGPKGPPGPPGPPGVTGMDGQPGPKGNVGPQGEPGPPGQQGNPGA |
| | QGLPGPQGAIGPPGEKGPLGKPGLPGMPGADGPPGHPGKEGPPGEKGGQGPPGPQG |
| | PIGYPGPRGVKGADGIRGLKGTKGEKGEDGFPGFKGDMGIKGDRGEIGPPGPRGED |
| | GPEGPKGRGGPNGDPGPLGPPGEKGKLGVPGLPGYPGRQGPKGSIGFPGFPGANGE |
| | KGGRGTPGKPGPRGQRGPTGPRGERGPRGITGKPGPKGNSGGDGPAGPPGERGPNG |
| | PQGPTGFPGPKGPPGPPGKDGLPGHPGQRGETGFQGKTGPPGPPGVVGPQGPTGET |
| | GPMGERGHPGPPGPPGEQGLPGLAGKEGTKGDPGPAGLPGKDGPPGLRGFPGDRGL |
| | PGPVGALGLKGNEGPPGPPGPAGSPGERGPAGAAGPIGIPGRPGPQGPPGPAGEKG |
| | APGEKGPQGPAGRDGLQGPVGLPGPAGPVGPPGEDGDKGEIGEPGQKGSKGDKGEQ |
| | GPPGPTGPQGPIGQPGPSGADGEPGPRGQQGLFGQKGDEGPRGFPGPPGPVGLQGL |
| | PGPPGEKGETGDVGQMGPPGPPGPRGPSGAPGADGPQGPPGGIGNPGAVGEKGEPG |
| | EAGEPGLPGEGGPPGPKGERGEKGESGPSGAAGPPGPKGPPGDDGPKGSPGPVGFP |
| | GDPGPPGEPGPAGQDGPPGDKGDDGEPGQTGSPGPTGEPGPSGPPGKRGPPGPAGP |
| | EGRQGEKGAKGEAGLEGPPGKTGPIGPQGAPGKPGPDGLRGIPGPVGEQGLPGSPG |
| | PDGPPGPMGPPGLPGLKGDSGPKGEKGHPGLIGLIGPPGEQGEKGDRGLPGPQGSS |
| | GPKGEQGITGPSGPIGPPGPPGLPGPPGPKGAKGSSGPTGPKGEAGHPGPPGPPGP |
| | PGEVIQPLPIQASRTRRNIDASQLLDDGNGENYVDYADGMEEIFGSLNSLKLEIEQ |
| | MKRPLGTQQNPARTCKDLQLCHPDFPDGEYWVDPNQGCSRDSFKVYCNFTAGGSTC |
| | VFPDKKSEGARITSWPKENPGSWFSEFKRGKLLSYVDAEGNPVGVVQMTFLRLLSA |
| | SAHQNVTYHCYQSVAWQDAATGSYDKALRFLGSNDEEMSYDNNPYIRALVDGCATK |
| | KGYQKTVLEIDTPKVEQVPIVDIMFNDFGEASQKFGFEVGPACFMG (SEQ ID |
| | NO: 218; GenBank Accession No. NP_000084.3) |
| Homo sapiens | MDVHTRWKARSALRPGAPLLPPLLLLLLWAPPPSRAAQPADLLKVLDFHNLPDGIT |
| COL5A1, | KTTGFCATRRSSKGPDVAYRVTKDAQLSAPTKQLYPASAFPEDFSILTTVKAKKGS |
| isoform 2 | QAFLVSIYNEQGIQQIGLELGRSPVFLYEDHTGKPGPEDYPLFRGINLSDGKWHRI |
| preprotein | ALSVHKKNVTLILDCKKKTTKFLDRSDHPMIDINGIIVFGTRILDEEVFEGDIQQL |
| | LFVSDHRAAYDYCEHYSPDCDTAVPDTPQSQDPNPDEYYTEGDGEGETYYYEYPYY |
| | EDPEDLGKEPTPSKKPVEAAKETTEVPEELTPTPTEAAPMPETSEGAGKEEDVGIG |
| | DYDYVPSEDYYTPSPYDDLTYGEGEENPDQPTDPGAGAEIPTSTADTSNSSNPAPP |
| | PGEGADDLEGEFTEETIRNLDENYYDPYYDPTSSPSEIGPGMPANQDTIYEGIGGP |
| | RGEKGQKGEPAIIEPGMLIEGPPGPEGPAGLPGPPGTMGPTGQVGDPGERGPPGRP |
| | GLPGADGLPGPPGTMLMLPFRFGGGGDAGSKGPMVSAQESQAQAILQQARLALRGP |
| | AGPMGLTGRPGPVGPPGSGGLKGEPGDVGPQGPRGVQGPPGPAGKPGRRGRAGSDG |
| | ARGMPGQTGPKGDRGFDGLAGLPGEKGHRGDPGPSGPPGPPGDDGERGDDGEVGPR |
| | GLPGEPGPRGLLGPKGPPGPPGPPGVTGMDGQPGPKGNVGPQGEPGPPGQQGNPGA |
| | QGLPGPQGAIGPPGEKGPLGKPGLPGMPGADGPPGHPGKEGPPGEKGGQGPPGPQG |
| | PIGYPGPRGVKGADGIRGLKGTKGEKGEDGFPGFKGDMGIKGDRGEIGPPGPRGED |
| | GPEGPKGRGGPNGDPGPLGPPGEKGKLGVPGLPGYPGRQGPKGSIGFPGFPGANGE |
| | KGGRGTPGKPGPRGQRGPTGPRGERGPRGITGKPGPKGNSGGDGPAGPPGERGPNG |
| | PQGPTGFPGPKGPPGPPGKDGLPGHPGQRGETGFQGKTGPPGPPGVVGPQGPTGET |
| | GPMGERGHPGPPGPPGEQGLPGLAGKEGTKGDPGPAGLPGKDGPPGLRGFPGDRGL |
| | PGPVGALGLKGNEGPPGPPGPAGSPGERGPAGAAGPIGIPGRPGPQGPPGPAGEKG |
| | APGEKGPQGPAGRDGLQGPVGLPGPAGPVGPPGEDGDKGEIGEPGQKGSKGDKGEQ |
| | GPPGPTGPQGPIGQPGPSGADGEPGPRGQQGLFGQKGDEGPRGFPGPPGPVGLQGL |
| | PGPPGEKGETGDVGQMGPPGPPGPRGPSGAPGADGPQGPPGGIGNPGAVGEKGEPG |
| | EAGEPGLPGEGGPPGPKGERGEKGESGPSGAAGPPGPKGPPGDDGPKGSPGPVGFP |
| | GDPGPPGEPGPAGQDGPPGDKGDDGEPGQTGSPGPTGEPGPSGPPGKRGPPGPAGP |
| | EGRQGEKGAKGEAGLEGPPGKTGPIGPQGAPGKPGPDGLRGIPGPVGEQGLPGSPG |
| | PDGPPGPMGPPGLPGLKGDSGPKGEKGHPGLIGLIGPPGEQGEKGDRGLPGPQGSS |
| | GPKGEQGITGPSGPIGPPGPPGLPGPPGPKGAKGSSGPTGPKGEAGHPGPPGPPGP |
| | PGEVIQPLPIQASRTRRNIDASQLLDDGNGENYVDYADGMEEIFGSLNSLKLEIEQ |
| | MKRPLGTQQNPARTCKDLQLCHPDFPDGEYWVDPNQGCSRDSFKVYCNFTAGGSTC |
| | VFPDKKSEGSKMARWPKEQPSTWYSQYKRGSLLSYVDAEGNPVGVVQMTFLRLLSA |
| | SAHQNVTYHCYQSVAWQDAATGSYDKALRFLGSNDEEMSYDNNPYIRALVDGCATK |
| | KGYQKTVLEIDTPKVEQVPIVDIMFNDFGEASQKFGFEVGPACFMG (SEQ ID |
| | NO: 219; GenBank Accession No. NP_001265003.1) |
| Homo sapiens | MMANWAEARPLLILIVLLGQFVSIKAQEEDEDEGYGEEIACTQNGQMYLNRDIWKP |
| collagen type V, | APCQICVCDNGAILCDKIECQDVLDCADPVTPPGECCPVCSQTPGGGNTNFGRGRK |
| alpha chain 2 | GQKGEPGLVPVVTGIRGRPGPAGPPGSQGPRGERGPKGRPGPRGPQGIDGEPGVPG |
| (COL5A2), | QPGAPGPPGHPSHPGPDGLSRPFSAQMAGLDEKSGLGSQVGLMPGSVGPVGPRGPQ |
| isoform 1 | GLQGQQGGAGPTGPPGEPGDPGPMGPIGSRGPEGPPGKPGEDGEPGRNGNPGEVGF |
| preprotein | AGSPGARGFPGAPGLPGLKGHRGHKGLEGPKGEVGAPGSKGEAGPTGPMGAMGPLG |
| | PRGMPGERGRLGPQGAPGQRGAHGMPGKPGPMGPLGIPGSSGFPGNPGMKGEAGPT |
| | GARGPEGPQGQRGETGPPGPVGSPGLPGAIGTDGTPGAKGPTGSPGTSGPPGSAGP |
| | PGSPGPQGSTGPQGIRGQPGDPGVPGFKGEAGPKGEPGPHGIQGPIGPPGEEGKRG |
| | PRGDPGTVGPPGPVGERGAPGNRGFPGSDGLPGPKGAQGERGPVGSSGPKGSQGDP |
| | GRPGEPGLPGARGLTGNPGVQGPEGKLGPLGAPGEDGRPGPPGSIGIRGQPGSMGL |
| | PGPKGSSGDPGKPGEAGNAGVPGQRGAPGKDGEVGPSGPVGPPGLAGERGEQGPPG |
| | PTGFQGLPGPPGPPGEGGKPGDQGVPGDPGAVGPLGPRGERGNPGERGEPGITGLP |
| | GEKGMAGGHGPDGPKGSPGPSGTPGDTGPPGLQGMPGERGIAGTPGPKGDRGGIGE |
| | KGAEGTAGNDGARGLPGPLGPPGPAGPTGEKGEPGPRGLVGPPGSRGNPGSRGENG |
| | PTGAVGFAGPQGPDGQPGVKGEPGEPGQKGDAGSPGPQGLAGSPGPHGPNGVPGLK |
| | GGRGTQGPPGATGFPGSAGRVGPPGPAGAPGPAGPLGEPGKEGPPGLRGDPGSHGR |
| | VGDRGPAGPPGGPGDKGDPGEDGQPGPDGPPGPAGTTGQRGIVGMPGQRGERGMPG |
| | LPGPAGTPGKVGPTGATGDKGPPGPVGPPGSNGPVGEPGPEGPAGNDGTPGRDGAV |
| | GERGDRGDPGPAGLPGSQGAPGTPGPVGAPGDAGQRGDPGSRGPIGPPGRAGKRGL |
| | PGPQGPRGDKGDHGDRGDRGQKGHRGFTGLQGLPGPPGPNGEQGSAGIPGPFGPRG |
| | PPGPVGPSGKEGNPGPLGPIGPPGVRGSVGEAGPEGPPGEPGPPGPPGPPGHLTAA |
| | LGDIMGHYDESMPDPLPEFTEDQAAPDDKNKTDPGVHATLKSLSSQIETMRSPDGS |
| | KKHPARTCDDLKLCHSAKQSGEYWIDPNQGSVEDAIKVYCNMETGETCISANPSSV |
| | PRKTWWASKSPDNKPVWYGLDMNRGSQFAYGDHQSPNTAITQMTFLRLLSKEASQN |
| | ITYICKNSVGYMDDQAKNLKKAVVLKGANDLDIKAEGNIRFRYIVLQDTCSKRNGN |
| | VGKTVFEYRTQNVARLPIIDLAPVDVGGTDQEFGVEIGPVCFV (SEQ ID NO: 220; |
| | GenBank Accession No. NP_000384.2) |
| Homo sapiens | MRAARALLPLLLQACWTAAQDEPETPRAVAFQDCPVDLFFVLDTSESVALRLKPYG |
| collagen type VI, | ALVDKVKSFTKRFIDNLRDRYYRCDRNLVWNAGALHYSDEVEIIQGLTRMPGGRDA |
| alpha chain 1 | LKSSVDAVKYFGKGTYTDCAIKKGLEQLLVGGSHLKENKYLIVVTDGHPLEGYKEP |
| (COL6A1) | CGGLEDAVNEAKHLGVKVFSVAITPDHLEPRLSIIATDHTYRRNFTAADWGQSRDA |
| | EEAISQTIDTIVDMIKNNVEQVCCSFECQPARGPPGLRGDPGFEGERGKPGLPGEK |
| | GEAGDPGRPGDLGPVGYQGMKGEKGSRGEKGSRGPKGYKGEKGKRGIDGVDGVKGE |
| | MGYPGLPGCKGSPGFDGIQGPPGPKGDPGAFGLKGEKGEPGADGEAGRPGSSGPSG |
| | DEGQPGEPGPPGEKGEAGDEGNPGPDGAPGERGGPGERGPRGTPGTRGPRGDPGEA |
| | GPQGDQGREGPVGVPGDPGEAGPIGPKGYRGDEGPPGSEGARGAPGPAGPPGDPGL |
| | MGERGEDGPAGNGTEGFPGFPGYPGNRGAPGINGTKGYPGLKGDEGEAGDPGDDNN |
| | DIAPRGVKGAKGYRGPEGPQGPPGHQGPPGPDECEIIDIIMKMCSCCECKCGPIDL |
| | LFVLDSSESIGLQNFEIAKDFVVKVIDRLSRDELVKFEPGQSYAGVVQYSHSQMQE |
| | HVSLRSPSIRNVQELKEAIKSLQWMAGGTFTGEALQYTRDQLLPPSPNNRIALVIT |
| | DGRSDTQRDTTPLNVLCSPGIQVVSVGIKDVFDFIPGSDQLNVISCQGLAPSQGRP |
| | GLSLVKENYAELLEDAFLKNVTAQICIDKKCPDYTCPITFSSPADITILLDGSASV |
| | GSHNFDTTKRFAKRLAERFLTAGRTDPAHDVRVAVVQYSGTGQQRPERASLQFLQN |
| | YTALASAVDAMDFINDATDVNDALGYVTRFYREASSGAAKKRLLLFSDGNSQGATP |
| | AAIEKAVQEAQRAGIEIFVVVVGRQVNEPHIRVLVTGKTAEYDVAYGESHLFRVPS |
| | YQALLRGVFHQTVSRKVALG (SEQ ID NO: 221; GenBank Accession No. |
| | NP_001839.2) |
| Homo sapiens | MLQGTCSVLLLWGILGAIQAQQQEVISPDTTERNNNCPEKTDCPIHVYFVLDTSES |
| COL6A2, | VTMQSPTDILLFHMKQFVPQFISQLQNEFYLDQVALSWRYGGLHFSDQVEVFSPPG |
| isoform 2C2 | SDRASFIKNLQGISSFRRGTFTDCALANMTEQIRQDRSKGTVHFAVVITDGHVTGS |
| | PCGGIKLQAERAREEGIRLFAVAPNQNLKEQGLRDIASTPHELYRNDYATMLPDST |
| | EIDQDTINRIIKVMKHEAYGECYKVSCLEIPGPSGPKGYRGQKGAKGNMGEPGEPG |
| | QKGRQGDPGIEGPIGFPGPKGVPGFKGEKGEFGADGRKGAPGLAGKNGTDGQKGKL |
| | GRIGPPGCKGDPGNRGPDGYPGEAGSPGERGDQGGKGDPGRPGRRGPPGEIGAKGS |
| | KGYQGNSGAPGSPGVKGAKGGPGPRGPKGEPGRRGDPGTKGSPGSDGPKGEKGDPG |
| | PEGPRGLAGEVGNKGAKGDRGLPGPRGPQGALGEPGKQGSRGDPGDAGPRGDSGQP |
| | GPKGDPGRPGFSYPGPRGAPGEKGEPGPRGPEGGRGDFGLKGEPGRKGEKGEPADP |
| | GPPGEPGPRGPRGVPGPEGEPGPPGDPGLTECDVMTYVRETCGCCDCEKRCGALDV |
| | VFVIDSSESIGYTNFTLEKNFVINVVNRLGAIAKDPKSETGTRVGVVQYSHEGTFE |
| | AIQLDDERIDSLSSFKEAVKNLEWIAGGTWTPSALKFAYDRLIKESRRQKTRVFAV |
| | VITDGRHDPRDDDLNLRALCDRDVTVTAIGIGDMFHEKHESENLYSIACDKPQQVR |
| | NMTLFSDLVAEKFIDDMEDVLCPDPQIVCPDLPCQTELSVAQCTQRPVDIVFLLDG |
| | SERLGEQNFHKARRFVEQVARRLTLARRDDDPLNARVALLQFGGPGEQQVAFPLSH |
| | NLTAIHEALETTQYLNSFSHVGAGVVHAINAIVRSPRGGARRHAELSFVFLTDGVT |
| | GNDSLHESAHSMRKQNVVPTVLALGSDVDMDVLTTLSLGDRAAVFHEKDYDSLAQP |
| | GFFDRFIRWIC (SEQ ID NO: 222; GenBank Accession No. NP_001840.3) |
| Homo sapiens | MLQGTCSVLLLWGILGAIQAQQQEVISPDTTERNNNCPEKTDCPIHVYFVLDTSES |
| COL6A2, | VTMQSPTDILLFHMKQFVPQFISQLQNEFYLDQVALSWRYGGLHFSDQVEVFSPPG |
| isoform 2C2a | SDRASFIKNLQGISSFRRGTFTDCALANMTEQIRQDRSKGTVHFAVVITDGHVTGS |
| | PCGGIKLQAERAREEGIRLFAVAPNQNLKEQGLRDIASTPHELYRNDYATMLPDST |
| | EIDQDTINRIIKVMKHEAYGECYKVSCLEIPGPSGPKGYRGQKGAKGNMGEPGEPG |
| | QKGRQGDPGIEGPIGFPGPKGVPGFKGEKGEFGADGRKGAPGLAGKNGTDGQKGKL |
| | GRIGPPGCKGDPGNRGPDGYPGEAGSPGERGDQGGKGDPGRPGRRGPPGEIGAKGS |
| | KGYQGNSGAPGSPGVKGAKGGPGPRGPKGEPGRRGDPGTKGSPGSDGPKGEKGDPG |
| | PEGPRGLAGEVGNKGAKGDRGLPGPRGPQGALGEPGKQGSRGDPGDAGPRGDSGQP |
| | GPKGDPGRPGFSYPGPRGAPGEKGEPGPRGPEGGRGDFGLKGEPGRKGEKGEPADP |
| | GPPGEPGPRGPRGVPGPEGEPGPPGDPGLTECDVMTYVRETCGCCDCEKRCGALDV |
| | VFVIDSSESIGYTNFTLEKNFVINVVNRLGAIAKDPKSETGTRVGVVQYSHEGTFE |
| | AIQLDDERIDSLSSFKEAVKNLEWIAGGTWTPSALKFAYDRLIKESRRQKTRVFAV |
| | VITDGRHDPRDDDLNLRALCDRDVTVTAIGIGDMFHEKHESENLYSIACDKPQQVR |
| | NMTLFSDLVAEKFIDDMEDVLCPDPQIVCPDLPCQTDAPWPGGEPPVTFLRTEEGP |
| | DATFPRTIPLIQQLLNATELTQDPAAYSQLVAVLVYTAERAKFATGVERQDWMELF |
| | IDTFKLVHRDIVGDPETALALC (SEQ ID NO: 223; GenBank Accession No. |
| | NP_478055.2) |
| Homo sapiens | MLQGTCSVLLLWGILGAIQAQQQEVISPDTTERNNNCPEKTDCPIHVYFVLDTSES |
| COL6A2,isofrm | VTMQSPTDILLFHMKQFVPQFISQLQNEFYLDQVALSWRYGGLHFSDQVEVFSPPG |
| 2C2a′ | SDRASFIKNLQGISSFRRGTFTDCALANMTEQIRQDRSKGTVHFAVVITDGHVTGS |
| | PCGGIKLQAERAREEGIRLFAVAPNQNLKEQGLRDIASTPHELYRNDYATMLPDST |
| | EIDQDTINRIIKVMKHEAYGECYKVSCLEIPGPSGPKGYRGQKGAKGNMGEPGEPG |
| | QKGRQGDPGIEGPIGFPGPKGVPGFKGEKGEFGADGRKGAPGLAGKNGTDGQKGKL |
| | GRIGPPGCKGDPGNRGPDGYPGEAGSPGERGDQGGKGDPGRPGRRGPPGEIGAKGS |
| | KGYQGNSGAPGSPGVKGAKGGPGPRGPKGEPGRRGDPGTKGSPGSDGPKGEKGDPG |
| | PEGPRGLAGEVGNKGAKGDRGLPGPRGPQGALGEPGKQGSRGDPGDAGPRGDSGQP |
| | GPKGDPGRPGFSYPGPRGAPGEKGEPGPRGPEGGRGDFGLKGEPGRKGEKGEPADP |
| | GPPGEPGPRGPRGVPGPEGEPGPPGDPGLTECDVMTYVRETCGCCDCEKRCGALDV |
| | VFVIDSSESIGYTNFTLEKNFVINVVNRLGAIAKDPKSETGTRVGVVQYSHEGTFE |
| | AIQLDDERIDSLSSFKEAVKNLEWIAGGTWTPSALKFAYDRLIKESRRQKTRVFAV |
| | VITDGRHDPRDDDLNLRALCDRDVTVTAIGIGDMFHEKHESENLYSIACDKPQQVR |
| | NMTLFSDLVAEKFIDDMEDVLCPDPQIVCPDLPCQTGLDGAVLC (SEQ ID |
| | NO: 224; GenBank Accession No. NP_001839.2) |
| Homo sapiens | MTLRLLVAALCAGILAEAPRVRAQHRERVTCTRLYAADIVFLLDGSSSIGRSNFRE |
| collagen type | VRSFLEGLVLPFSGAASAQGVRFATVQYSDDPRTEFGLDALGSGGDVIRAIRELSY |
| VII, alpha chain | KGGNTRTGAAILHVADHVFLPQLARPGVPKVCILITDGKSQDLVDTAAQRLKGQGV |
| 1 (COL7A1) | KLFAVGIKNADPEELKRVASQPTSDFFFFVNDFSILRTLLPLVSRRVCTTAGGVPV |
| | TRPPDDSTSAPRDLVLSEPSSQSLRVQWTAASGPVTGYKVQYTPLTGLGQPLPSER |
| | QEVNVPAGETSVRLRGLRPLTEYQVTVIALYANSIGEAVSGTARTTALEGPELTIQ |
| | NTTAHSLLVAWRSVPGATGYRVTWRVLSGGPTQQQELGPGQGSVLLRDLEPGTDYE |
| | VTVSTLFGRSVGPATSLMARTDASVEQTLRPVILGPTSILLSWNLVPEARGYRLEW |
| | RRETGLEPPQKVVLPSDVTRYQLDGLQPGTEYRLTLYTLLEGHEVATPATVVPTGP |
| | ELPVSPVTDLQATELPGQRVRVSWSPVPGATQYRIIVRSTQGVERTLVLPGSQTAF |
| | DLDDVQAGLSYTVRVSARVGPREGSASVLTVRREPETPLAVPGLRVVVSDATRVRV |
| | AWGPVPGASGFRISWSTGSGPESSQTLPPDSTATDITGLQPGTTYQVAVSVLRGRE |
| | EGPAAVIVARTDPLGPVRTVHVTQASSSSVTITWTRVPGATGYRVSWHSAHGPEKS |
| | QLVSGEATVAELDGLEPDTEYTVHVRAHVAGVDGPPASVVVRTAPEPVGRVSRLQI |
| | LNASSDVLRITWVGVTGATAYRLAWGRSEGGPMRHQILPGNTDSAEIRGLEGGVSY |
| | SVRVTALVGDREGTPVSIVVTTPPEAPPALGTLHVVQRGEHSLRLRWEPVPRAQGF |
| | LLHWQPEGGQEQSRVLGPELSSYHLDGLEPATQYRVRLSVLGPAGEGPSAEVTART |
| | ESPRVPSIELRVVDTSIDSVTLAWTPVSRASSYILSWRPLRGPGQEVPGSPQTLPG |
| | ISSSQRVTGLEPGVSYIFSLTPVLDGVRGPEASVTQTPVCPRGLADVVFLPHATQD |
| | NAHRAEATRRVLERLVLALGPLGPQAVQVGLLSYSHRPSPLFPLNGSHDLGIILQR |
| | IRDMPYMDPSGNNLGTAVVTAHRYMLAPDAPGRRQHVPGVMVLLVDEPLRGDIFSP |
| | IREAQASGLNVVMLGMAGADPEQLRRLAPGMDSVQTFFAVDDGPSLDQAVSGLATA |
| | LCQASFTTQPRPEPCPVYCPKGQKGEPGEMGLRGQVGPPGDPGLPGRTGAPGPQGP |
| | PGSATAKGERGFPGADGRPGSPGRAGNPGTPGAPGLKGSPGLPGPRGDPGERGPRG |
| | PKGEPGAPGQVIGGEGPGLPGRKGDPGPSGPPGPRGPLGDPGPRGPPGLPGTAMKG |
| | DKGDRGERGPPGPGEGGIAPGEPGLPGLPGSPGPQGPVGPPGKKGEKGDSEDGAPG |
| | LPGQPGSPGEQGPRGPPGAIGPKGDRGFPGPLGEAGEKGERGPPGPAGSRGLPGVA |
| | GRPGAKGPEGPPGPTGRQGEKGEPGRPGDPAVVGPAVAGPKGEKGDVGPAGPRGAT |
| | GVQGERGPPGLVLPGDPGPKGDPGDRGPIGLTGRAGPPGDSGPPGEKGDPGRPGPP |
| | GPVGPRGRDGEVGEKGDEGPPGDPGLPGKAGERGLRGAPGVRGPVGEKGDQGDPGE |
| | DGRNGSPGSSGPKGDRGEPGPPGPPGRLVDTGPGAREKGEPGDRGQEGPRGPKGDP |
| | GLPGAPGERGIEGFRGPPGPQGDPGVRGPAGEKGDRGPPGLDGRSGLDGKPGAAGP |
| | SGPNGAAGKAGDPGRDGLPGLRGEQGLPGPSGPPGLPGKPGEDGKPGLNGKNGEPG |
| | DPGEDGRKGEKGDSGASGREGRDGPKGERGAPGILGPQGPPGLPGPVGPPGQGFPG |
| | VPGGTGPKGDRGETGSKGEQGLPGERGLRGEPGSVPNVDRLLETAGIKASALREIV |
| | ETWDESSGSFLPVPERRRGPKGDSGEQGPPGKEGPIGFPGERGLKGDRGDPGPQGP |
| | PGLALGERGPPGPSGLAGEPGKPGIPGLPGRAGGVGEAGRPGERGERGEKGERGEQ |
| | GRDGPPGLPGTPGPPGPPGPKVSVDEPGPGLSGEQGPPGLKGAKGEPGSNGDQGPK |
| | GDRGVPGIKGDRGEPGPRGQDGNPGLPGERGMAGPEGKPGLQGPRGPPGPVGGHGD |
| | PGPPGAPGLAGPAGPQGPSGLKGEPGETGPPGRGLTGPTGAVGLPGPPGPSGLVGP |
| | QGSPGLPGQVGETGKPGAPGRDGASGKDGDRGSPGVPGSPGLPGPVGPKGEPGPTG |
| | APGQAVVGLPGAKGEKGAPGGLAGDLVGEPGAKGDRGLPGPRGEKGEAGRAGEPGD |
| | PGEDGQKGAPGPKGFKGDPGVGVPGSPGPPGPPGVKGDLGLPGLPGAPGVVGFPGQ |
| | TGPRGEMGQPGPSGERGLAGPPGREGIPGPLGPPGPPGSVGPPGASGLKGDKGDPG |
| | VGLPGPRGERGEPGIRGEDGRPGQEGPRGLTGPPGSRGERGEKGDVGSAGLKGDKG |
| | DSAVILGPPGPRGAKGDMGERGPRGLDGDKGPRGDNGDPGDKGSKGEPGDKGSAGL |
| | PGLRGLLGPQGQPGAAGIPGDPGSPGKDGVPGIRGEKGDVGFMGPRGLKGERGVKG |
| | ACGLDGEKGDKGEAGPPGRPGLAGHKGEMGEPGVPGQSGAPGKEGLIGPKGDRGFD |
| | GQPGPKGDQGEKGERGTPGIGGFPGPSGNDGSAGPPGPPGSVGPRGPEGLQGQKGE |
| | RGPPGERVVGAPGVPGAPGERGEQGRPGPAGPRGEKGEAALTEDDIRGFVRQEMSQ |
| | HCACQGQFIASGSRPLPSYAADTAGSQLHAVPVLRVSHAEEEERVPPEDDEYSEYS |
| | EYSVEEYQDPEAPWDSDDPCSLPLDEGSCTAYTLRWYHRAVTGSTEACHPFVYGGC |
| | GGNANRFGTREACERRCPPRVVQSQGTGTAQD (SEQ ID NO: 225; GenBank |
| | Accession No. NP_000085.1) |
| Homo sapiens | MAVLPGPLQLLGVLLTISLSSIRLIQAGAYYGIKPLPPQIPPQMPPQIPQYQPLGQ |
| collagen type | QVPHMPLAKDGLAMGKEMPHLQYGKEYPHLPQYMKEIQPAPRMGKEAVPKKGKEIP |
| VIII, alpha chain | LASLRGEQGPRGEPGPRGPPGPPGLPGHGIPGIKGKPGPQGYPGVGKPGMPGMPGK |
| 1 (COL8A1) | PGAMGMPGAKGEIGQKGEIGPMGIPGPQGPPGPHGLPGIGKPGGPGLPGQPGPKGD |
| | RGPKGLPGPQGLRGPKGDKGFGMPGAPGVKGPPGMHGPPGPVGLPGVGKPGVTGFP |
| | GPQGPLGKPGAPGEPGPQGPIGVPGVQGPPGIPGIGKPGQDGIPGQPGFPGGKGEQ |
| | GLPGLPGPPGLPGIGKPGFPGPKGDRGMGGVPGALGPRGEKGPIGAPGIGGPPGEP |
| | GLPGIPGPMGPPGAIGFPGPKGEGGIVGPQGPPGPKGEPGLQGFPGKPGFLGEVGP |
| | PGMRGLPGPIGPKGEAGQKGVPGLPGVPGLLGPKGEPGIPGDQGLQGPPGIPGIGG |
| | PSGPIGPPGIPGPKGEPGLPGPPGFPGIGKPGVAGLHGPPGKPGALGPQGQPGLPG |
| | PPGPPGPPGPPAVMPPTPPPQGEYLPDMGLGIDGVKPPHAYGAKKGKNGGPAYEMP |
| | AFTAELTAPFPPVGAPVKFNKLLYNGRQNYNPQTGIFTCEVPGVYYFAYHVHCKGG |
| | NVWVALFKNNEPVMYTYDEYKKGFLDQASGSAVLLLRPGDRVFLQMPSEQAAGLYA |
| | GQYVHSSFSGYLLYPM (SEQ ID NO: 226; GenBank Accession No. NP_065084.2) |
| Homo sapiens | MLGTLTPLSSLLLLLLVLVLGCGPRASSGGGAGGAAGYAPVKYIQPMQKGPVGPPF |
| collagen type | REGKGQYLEMPLPLLPMDLKGEPGPPGKPGPRGPPGPPGFPGKPGMGKPGLHGQPG |
| VIII, alpha chain | PAGPPGFSRMGKAGPPGLPGKVGPPGQPGLRGEPGIRGDQGLRGPPGPPGLPGPSG |
| 2 (COL8A2), | ITIPGKPGAQGVPGPPGFQGEPGPQGEPGPPGDRGLKGDNGVGQPGLPGAPGQGGA |
| isoform | PGPPGLPGPAGLGKPGLDGLPGAPGDKGESGPPGVPGPRGEPGAVGPKGPPGVDGV |
| 1precursor | GVPGAAGLPGPQGPSGAKGEPGTRGPPGLIGPTGYGMPGLPGPKGDRGPAGVPGLL |
| | GDRGEPGEDGEPGEQGPQGLGGPPGLPGSAGLPGRRGPPGPKGEAGPGGPPGVPGI |
| | RGDQGPSGLAGKPGVPGERGLPGAHGPPGPTGPKGEPGFTGRPGGPGVAGALGQKG |
| | DLGLPGQPGLRGPSGIPGLQGPAGPIGPQGLPGLKGEPGLPGPPGEGRAGEPGTAG |
| | PTGPPGVPGSPGITGPPGPPGPPGPPGAPGAFDETGIAGLHLPNGGVEGAVLGKGG |
| | KPQFGLGELSAHATPAFTAVLTSPFPASGMPVKFDRTLYNGHSGYNPATGIFTCPV |
| | GGVYYFAYHVHVKGTNVWVALYKNNVPATYTYDEYKKGYLDQASGGAVLQLRPNDQ |
| | VWVQMPSDQANGLYSTEYIHSSFSGFLLCPT (SEQ ID NO: 227; GenBank |
| | Accession No. NP_005193.1) |
| Homo sapiens | MPLPLLPMDLKGEPGPPGKPGPRGPPGPPGFPGKPGMGKPGLHGQPGPAGPPGFSR |
| COL8A2, | MGKAGPPGLPGKVGPPGQPGLRGEPGIRGDQGLRGPPGPPGLPGPSGITIPGKPGA |
| isoform | QGVPGPPGFQGEPGPQGEPGPPGDRGLKGDNGVGQPGLPGAPGQGGAPGPPGLPGP |
| 2precursor | AGLGKPGLDGLPGAPGDKGESGPPGVPGPRGEPGAVGPKGPPGVDGVGVPGAAGLP |
| | GPQGPSGAKGEPGTRGPPGLIGPTGYGMPGLPGPKGDRGPAGVPGLLGDRGEPGED |
| | GEPGEQGPQGLGGPPGLPGSAGLPGRRGPPGPKGEAGPGGPPGVPGIRGDQGPSGL |
| | AGKPGVPGERGLPGAHGPPGPTGPKGEPGFTGRPGGPGVAGALGQKGDLGLPGQPG |
| | LRGPSGIPGLQGPAGPIGPQGLPGLKGEPGLPGPPGEGRAGEPGTAGPTGPPGVPG |
| | SPGITGPPGPPGPPGPPGAPGAFDETGIAGLHLPNGGVEGAVLGKGGKPQFGLGEL |
| | SAHATPAFTAVLTSPFPASGMPVKFDRTLYNGHSGYNPATGIFTCPVGGVYYFAYH |
| | VHVKGTNVWVALYKNNVPATYTYDEYKKGYLDQASGGAVLQLRPNDQVWVQMPSDQ |
| | ANGLYSTEYIHSSFSGFLLCPT (SEQ ID NO: 228; GenBank Accession No. |
| | NP_001281276.1) |
| Homo sapiens | MRSRLPPALAALGAALLLSSIEAEGMECLTRAEADIVLLVDGSWSIGRANFRTVRS |
| collagen type | FISRIVEVFDIGPKRVQIALAQYSGDPRTEWQLNAHRDKKSLLQAVANLPYKGGNT |
| XII, alpha chain | LTGMALNFIRQQNFRTQAGMRPRARKIGVLITDGKSQDDVEAPSKKLKDEGVELFA |
| 1 | IGIKNADEVELKMIATDPDDTHAYNVADFESLSRIVDDLTINLCNSVKGPGDLEAP |
| (COL12A1)short | SNLVISERTHRSFRVSWTPPSDSVDRYKVEYYPVSGGKRQEFYVSRMETSTVLKDL |
| form | KPETEYVVNVYSVVEDEYSEPLKGTEKTLPVPVVSLNIYDVGPTTMHVQWQPVGGA |
| | TGYILSYKPVKDTEPTRPKEVRLGPTVNDMQLTDLVPNTEYAVTVQAVLHDLTSEP |
| | VTVREVTLPLPRPQDLKLRDVTHSTMNVFWEPVPGKVRKYIVRYKTPEEDVKEVEV |
| | DRSETSTSLKDLFSQTLYTVSVSAVHDEGESPPVTAQETTRPVPAPTNLKITEVTS |
| | EGFRGTWDHGASDVSLYRITWAPFGSSDKMETILNGDENTLVFENLNPNTIYEVSI |
| | TAIYPDESESDDLIGSERTLPILTTQAPKSGPRNLQVYNATSNSLTVKWDPASGRV |
| | QKYRITYQPSTGEGNEQTTTIGGRQNSVVLQKLKPDTPYTITVSSLYPDGEGGRMT |
| | GRGKTKPLNTVRNLRVYDPSTSTLNVRWDHAEGNPRQYKLFYAPAAGGPEELVPIP |
| | GNTNYAILRNLQPDTSYTVTVVPVYTEGDGGRTSDTGRTLMRGLARNVQVYNPTPN |
| | SLDVRWDPAPGPVLQYRVVYSPVDGTRPSESIVVPGNTRMVHLERLIPDTLYSVNL |
| | VALYSDGEGNPSPAQGRTLPRSGPRNLRVFGETTNSLSVAWDHADGPVQQYRIIYS |
| | PTVGDPIDEYTTVPGRRNNVILQPLQPDTPYKITVIAVYEDGDGGHLTGNGRTVGL |
| | LPPQNIHISDEWYTRFRVSWDPSPSPVLGYKIVYKPVGSNEPMEAFVGEMTSYTLH |
| | NLNPSTTYDVNVYAQYDSGLSVPLTDQGTTLYLNVTDLKTYQIGWDTFCVKWSPHR |
| | AATSYRLKLSPADGTRGQEITVRGSETSHCFTGLSPDTDYGVTVFVQTPNLEGPGV |
| | SVKEHTTVKPTEAPTEPPTPPPPPTIPPARDVCKGAKADIVFLTDASWSIGDDNFN |
| | KVVKFIFNTVGGFDEISPAGIQVSFVQYSDEVKSEFKLNTYNDKALALGALQNIRY |
| | RGGNTRTGKALTFIKEKVLTWESGMRKNVPKVLVVVTDGRSQDEVKKAALVIQQSG |
| | FSVFVVGVADVDYNELANIASKPSERHVFIVDDFESFEKIEDNLITFVCETATSSC |
| | PLIYLDGYTSPGFKMLEAYNLTEKNFASVQGVSLESGSFPSYSAYRIQKNAFVNQP |
| | TADLHPNGLPPSYTIILLFRLLPETPSDPFAIWQITDRDYKPQVGVIADPSSKTLS |
| | FFNKDTRGEVQTVTFDTEEVKTLFYGSFHKVHIVVTSKSVKIYIDCYEIIEKDIKE |
| | AGNITTDGYEILGKLLKGERKSAAFQIQSFDIVCSPVWTSRDRCCDIPSRRDEGKC |
| | PAFPNSCTCTQDSVGPPGPPGPAGGPGAKGPRGERGISGAIGPPGPRGDIGPPGPQ |
| | GPPGPQGPNGLSIPGEQGRQGMKGDAGEPGLPGRTGTPGLPGPPGPMGPPGDRGFT |
| | GKDGAMGPRGPPGPPGSPGSPGVTGPSGKPGKPGDHGRPGPSGLKGEKGDRGDIAS |
| | QNMMRAVARQVCEQLISGQMNRFNQMLNQIPNDYQSSRNQPGPPGPPGPPGSAGAR |
| | GEPGPGGRPGFPGTPGMQGPPGERGLPGEKGERGTGSSGPRGLPGPPGPQGESRTG |
| | PPGSTGSRGPPGPPGRPGNSGIRGPPGPPGYCDSSQCASIPYNGQGYPGSG (SEQ |
| | ID NO: 229; GenBank Accession No. NP_542376.2) |
| Homo sapiens | MRSRLPPALAALGAALLLSSIEAEVDPPSDLNFKIIDENTVHMSWAKPVDPIVGYR |
| COL12A1, | ITVDPTTDGPTKEFTLSASTTETLLSELVPETEYVVTITSYDEVEESVPVIGQLTI |
| longform | QTGSSTKPVEKKPGKTEIQKCSVSAWTDLVFLVDGSWSVGRNNFKYILDFIAALVS |
| | AFDIGEEKTRVGVVQYSSDTRTEFNLNQYYQRDELLAAIKKIPYKGGNTMTGDAID |
| | YLVKNTFTESAGARVGFPKVAIIITDGKSQDEVEIPARELRNVGVEVFSLGIKAAD |
| | AKELKQIASTPSLNHVFNVANFDAIVDIQNEIISQVCSGVDEQLGELVSGEEVVEP |
| | PSNLIAMEVSSKYVKLNWNPSPSPVTGYKVILTPMTAGSRQHALSVGPQTTTLSVR |
| | DLSADTEYQISVSAMKGMTSSEPTSIMEKTQPMKVQVECSRGVDIKADIVFLVDGS |
| | YSIGIANFVKVRAFLEVLVKSFEISPNRVQISLVQYSRDPHTEFTLKKFTKVEDII |
| | EAINTFPYRGGSTNTGKAMTYVREKIFVPSKGSRSNVPKVMILITDGKSSDAFRDP |
| | AIKLRNSDVEIFAVGVKDAVRSELEAIASPPAETHVFTVEDFDAFQRISFELTQSI |
| | CLRIEQELAAIKKKAYVPPKDLSFSEVTSYGFKTNWSPAGENVFSYHITYKEAAGD |
| | DEVTVVEPASSTSVVLSSLKPETLYLVNVTAEYEDGFSIPLAGEETTEEVKGAPRN |
| | LKVTDETTDSFKITWTQAPGRVLRYRIIYRPVAGGESREVTTPPNQRRRTLENLIP |
| | DTKYEVSVIPEYFSGPGTPLTGNAATEEVRGNPRDLRVSDPTTSTMKLSWSGAPGK |
| | VKQYLVTYTPVAGGETQEVTVRGDTTNTVLQGLKEGTQYALSVTALYASGAGDALF |
| | GEGTTLEERGSPQDLVTKDITDTSIGAYWTSAPGMVRGYRVSWKSLYDDVDTGEKN |
| | LPEDAIHTMIENLQPETKYRISVFATYSSGEGEPLTGDATTELSQDSKTLKVDEET |
| | ENTMRVTWKPAPGKVVNYRVVYRPHGRGKQMVAKVPPTVTSTVLKRLQPQTTYDIT |
| | VLPIYKMGEGKLRQGSGTTASRFKSPRNLKTSDPTMSSFRVTWEPAPGEVKGYKVT |
| | FHPTGDDRRLGELVVGPYDNTVVLEELRAGTTYKVNVFGMFDGGESSPLVGQEMTT |
| | LSDTTVMPIISSGMECLTRAEADIVLLVDGSWSIGRANFRTVRSFISRIVEVFDIG |
| | PKRVQIALAQYSGDPRTEWQLNAHRDKKSLLQAVANLPYKGGNTLTGMALNFIRQQ |
| | NFRTQAGMRPRARKIGVLITDGKSQDDVEAPSKKLKDEGVELFAIGIKNADEVELK |
| | MIATDPDDTHAYNVADFESLSRIVDDLTINLCNSVKGPGDLEAPSNLVISERTHRS |
| | FRVSWTPPSDSVDRYKVEYYPVSGGKRQEFYVSRMETSTVLKDLKPETEYVVNVYS |
| | VVEDEYSEPLKGTEKTLPVPVVSLNIYDVGPTTMHVQWQPVGGATGYILSYKPVKD |
| | TEPTRPKEVRLGPTVNDMQLTDLVPNTEYAVTVQAVLHDLTSEPVTVREVTLPLPR |
| | PQDLKLRDVTHSTMNVFWEPVPGKVRKYIVRYKTPEEDVKEVEVDRSETSTSLKDL |
| | FSQTLYTVSVSAVHDEGESPPVTAQETTRPVPAPTNLKITEVTSEGFRGTWDHGAS |
| | DVSLYRITWAPFGSSDKMETILNGDENTLVFENLNPNTIYEVSITAIYPDESESDD |
| | LIGSERTLPILTTQAPKSGPRNLQVYNATSNSLTVKWDPASGRVQKYRITYQPSTG |
| | EGNEQTTTIGGRQNSVVLQKLKPDTPYTITVSSLYPDGEGGRMTGRGKTKPLNTVR |
| | NLRVYDPSTSTLNVRWDHAEGNPRQYKLFYAPAAGGPEELVPIPGNTNYAILRNLQ |
| | PDTSYTVTVVPVYTEGDGGRTSDTGRTLMRGLARNVQVYNPTPNSLDVRWDPAPGP |
| | VLQYRVVYSPVDGTRPSESIVVPGNTRMVHLERLIPDTLYSVNLVALYSDGEGNPS |
| | PAQGRTLPRSGPRNLRVFGETTNSLSVAWDHADGPVQQYRIIYSPTVGDPIDEYTT |
| | VPGRRNNVILQPLQPDTPYKITVIAVYEDGDGGHLTGNGRTVGLLPPQNIHISDEW |
| | YTRFRVSWDPSPSPVLGYKIVYKPVGSNEPMEAFVGEMTSYTLHNLNPSTTYDVNV |
| | YAQYDSGLSVPLTDQGTTLYLNVTDLKTYQIGWDTFCVKWSPHRAATSYRLKLSPA |
| | DGTRGQEITVRGSETSHCFTGLSPDTDYGVTVFVQTPNLEGPGVSVKEHTTVKPTE |
| | APTEPPTPPPPPTIPPARDVCKGAKADIVFLTDASWSIGDDNFNKVVKFIFNTVGG |
| | FDEISPAGIQVSFVQYSDEVKSEFKLNTYNDKALALGALQNIRYRGGNTRTGKALT |
| | FIKEKVLTWESGMRKNVPKVLVVVTDGRSQDEVKKAALVIQQSGFSVFVVGVADVD |
| | YNELANIASKPSERHVFIVDDFESFEKIEDNLITFVCETATSSCPLIYLDGYTSPG |
| | FKMLEAYNLTEKNFASVQGVSLESGSFPSYSAYRIQKNAFVNQPTADLHPNGLPPS |
| | YTIILLFRLLPETPSDPFAIWQITDRDYKPQVGVIADPSSKTLSFFNKDTRGEVQT |
| | VTFDTEEVKTLFYGSFHKVHIVVTSKSVKIYIDCYEIIEKDIKEAGNITTDGYEIL |
| | GKLLKGERKSAAFQIQSFDIVCSPVWTSRDRCCDIPSRRDEGKCPAFPNSCTCTQD |
| | SVGPPGPPGPAGGPGAKGPRGERGISGAIGPPGPRGDIGPPGPQGPPGPQGPNGLS |
| | IPGEQGRQGMKGDAGEPGLPGRTGTPGLPGPPGPMGPPGDRGFTGKDGAMGPRGPP |
| | GPPGSPGSPGVTGPSGKPGKPGDHGRPGPSGLKGEKGDRGDIASQNMMRAVARQVC |
| | EQLISGQMNRFNQMLNQIPNDYQSSRNQPGPPGPPGPPGSAGARGEPGPGGRPGFP |
| | GTPGMQGPPGERGLPGEKGERGTGSSGPRGLPGPPGPQGESRTGPPGSTGSRGPPG |
| | PPGRPGNSGIRGPPGPPGYCDSSQCASIPYNGQGYPGSG (SEQ ID NO: 230; |
| | GenBank Accession No. NP_004361.3) |
| Homo sapiens | MGLTGPPGQPGPQGQKGEKGQCGEYPHRLLPLLNSVRLAPPPVIKRRTFQGEQSQA |
| collagen type | SIQGPPGPPGPPGPSGPLGHPGLPGPMGPPGLPGPPGPKGDPGIQGYHGRKGERGM |
| XIII, alpha chain | PGMPGKHGAKGAPGIAVAGMKGEPGIPGTKGEKGAEGSPGLPGLLGQKGEKGDAGN |
| 1 | SIGGGRGEPGPPGLPGPPGPKGEAGVDGQVGPPGQPGDKGERGAAGEQGPDGPKGS |
| (COL13A1) | KGEPGKGEMVDYNGNINEALQEIRTLALMGPPGLPGQIGPPGAPGIPGQKGEIGIP |
| isoform27 | GPPGHDGEKGPRGKPGDMGPPGPQGPPGKDGPPGVKGENGHPGSPGEKGEKGETGQ |
| | AGSPVPGLPGPEGPPGPPGLQGVPGPKGEAGLDGAKGEKGFQGEKGDRGPLGLPGT |
| | PGPIGVPGPAGPKGERGSKGDPGMTGPTGAAGLPGLHGPPGDKGNRGHRGFKGEKG |
| | EPGLPGLDGLDAPCPLGEDGLPVQGCWNK (SEQ ID NO: 231; GenBank Accession |
| | No. NP_001355815.1) |
| Homo sapiens | MVAERTHKAAATGARGPGELGAPGTVALVAARAERGARLPSPGSCGLLTLALCSLA |
| COL13A1, | LSLLAHFRTAELQARVLRLEAERGEQQMETAILGRVNQLLDEKWKLHSRRRREAPK |
| isoform 26 | TSPGCNCPPGPPGPTGRPGLPGVKGQPGEKGSPGDAGLSIIGPRGPPGQPGTRGFP |
| | GFPGPIGLDGKPGHPGPKGDMGLTGPPGQPGPQGQKGEKGQCGEYPHRLLPLLNSV |
| | RLAPPPVIKRRTFQGEQSQASIQGPPGPPGPPGPSGPLGHPGLPGPMGPPGLPGPP |
| | GPKGDPGIQGYHGRKGERGMPGMPGKHGAKGAPGIAVAGMKGEPGIPGTKGEKGAE |
| | GSPGLPGLLGQKGEKGDAGNSIGGGRGEPGPPGLPGPPGPKGEAGVDGQVGPPGQP |
| | GDKGERGAAGEQGPDGPKGSKGEPGKGEMVDYNGNINEALQEIRTLALMGPPGLPG |
| | QIGPPGAPGIPGQKGEIGLPGPPGHDGEKGPRGKPGDMGPPGPQGPPGKDGPPGVK |
| | GENGHPGSPGEKGEKGETGQAGSPGLQGVPGPKGEAGLDGAKGEKGFQGEKGDRGP |
| | LGLPGTPGPIGVPGPAGPKGERGSKGDPGMTGPTGAAGLPGLHGPPGDKGNRGHRG |
| | FKGEKGEPGLPGLDGLDAPCPLGEDGLPVQGCWNK (SEQ ID NO: 232; GenBank |
| | Accession No. NP_001355814.1) |
| Homo sapiens | MVAERTHKAAATGARGPGELGAPGTVALVAARAERGARLPSPGSCGLLTLALCSLA |
| COL13A1, | LSLLAHFRTAELQARVLRLEAERGEQQMETAILGRVNQLLDEKWKLHSRRRREAPK |
| isoform 23 | TSPGCNCPPGPPGPTGRPGLPGDKGAIGMPGRVGVKGQPGEKGSPGDAGLSIIGPR |
| | GPPGQPGTRGFPGFPGPIGLDGKPGHPGPKGDMGLTGPPGQPGPQGQKGEKGQCGE |
| | YPHRLLPLLNSVRLAPPPVIKRRTFQGEQSQASIQGPPGPPGPPGPSGPLGHPGLP |
| | GPMGPPGLPGPPGPKGDPGIQGYHGRKGERGMPGMPGKHGAKGAPGIAVAGMKGEP |
| | GIPGTKGDPGAEGKPGPPGLLGKRGQRGEKGAEGSPGLPGLLGQKGEKGDAGNSIG |
| | GGRGEPGPPGLPGPPGPKGEAGVDGQVGPPGQPGDKGERGAAGEQGPDGPKGSKGE |
| | PGKGEMVDYNGNINEALQEIRTLALMGPPGLPGQIGPPGAPGIPGQKGEIGLPGPP |
| | GHDGEKGPRGKPGDMGPPGPQGPPGKDGPPGVKGENGHPGSPGEKGEKGETGQAGS |
| | PGEKGEAGEKGNPGAEVPGLPGPEGPPGPPGLQGVPGPKGEAGLDGAKGEKGFQGE |
| | KGDRGPLGLPGASGLDGRPGPPGTPGPIGVPGPAGPKGERGSKGDPGMTGPTGAAG |
| | LPGLHGPPGDKGNRGERGKKGSRGPKGDKGDQGAPGLDAPCPLGEDGLPVQGCWNK |
| | (SEQ ID NO: 233; GenBank Accession No. NP_001355811.1) |
| Homo sapiens | MVAERTHKAAATGARGPGELGAPGTVALVAARAERGARLPSPGSCGLLTLALCSLA |
| COL13A1, | LSLLAHFRTAELQARVLRLEAERGEQQMETAILGRVNQLLDEKWKLHSRRRREAPK |
| isoform 22 | TSPGCNCPPGPPGPTGRPGLPGDKGAIGMPGRVGVKGQPGEKGSPGDAGLSIIGPR |
| | GPPGQPGTRGFPGFPGPIGLDGKPGHPGPKGDMGLTGPPGQPGPQGQKGEKGQCGE |
| | YPHRLLPLLNSVRLAPPPVIKRRTFQGEQSQASIQGPPGPPGPPGPSGPLGHPGLP |
| | GPMGPPGLPGPPGPKGDPGIQGYHGRKGERGMPGMPGKHGAKGAPGIAVAGMKGEP |
| | GIPGTKGEKGAEGSPGLPGLLGQKGEKGDAGNSIGGGRGEPGPPGLPGPPGPKGEA |
| | GVDGQVGPPGQPGDKGERGAAGEQGPDGPKGSKGEPGKGEMVDYNGNINEALQEIR |
| | TLALMGPPGLPGQIGPPGAPGIPGQKGEIGLPGPPGHDGEKGPRGKPGDMGPPGPQ |
| | GPPGKDGPPGVKGENGHPGSPGEKGEKGETGQAGSPVPGLPGPEGPPGPPGLQGVP |
| | GPKGEAGLDGAKGEKGFQGEKGDRGPLGLPGTPGPIGVPGPAGPKGERGSKGDPGM |
| | TGPTGAAGLPGLHGPPGDKGNRGERGKKGSRGPKGDKGDQGAPGLDAPCPLGEDGL |
| | PVQGCWNK (SEQ ID NO: 234; GenBank Accession No. NP_001307880.1) |
| Homo sapiens | MVAERTHKAAATGARGPGELGAPGTVALVAARAERGARLPSPGSCGLLTLALCSLA |
| COL13A1, | LSLLAHFRTAELQARVLRLEAERGEQQMETAILGRVNQLLDEKWKLHSRRRREAPK |
| isoform 28 | TSPGCNCPPGPPGSPGDAGLSIIGPRGPPGQPGTRGFPGFPGPIGLDGKPGHPGPK |
| | GDMGLTGPPGQPGPQGQKGEKGQCGEYPHRLLPLLNSVRLAPPPVIKRRTFQGEQS |
| | QASIQGPPGPPGPPGPSGPLGHPGLPGPMGPPGLPGPPGPKGDPGIQGYHGRKGER |
| | GMPGMPGKHGAKGAPGIAVAGMKGEPGIPGTKGDPGAEGKPGPPGLLGKRGQRGEK |
| | GAEGSPGLPGLLGQKGEKGDAGNSIGGGRGEPGPPGLPGPPGPKGEAGVDGQVGPP |
| | GQPGDKGERGAAGEQGPDGPKGSKGEPGKGEMVDYNGNINEALQEIRTLALMGPPG |
| | LPGQIGPPGAPGIPGQKGEIGLPGPPGHDGEKGPRGKPGDMGPPGPQGPPGKDGPP |
| | GVKGENGHPGSPGEKGEKGETGQAGSPGLQGVPGPKGEAGLDGAKGEKGFQGEKGD |
| | RGPLGLPGTPGPIGVPGPAGPKGERGSKGDPGMTGPTGAAGLPGLHGPPGDKGNRG |
| | ERGKKGSRGPKGDKGDQGAPGLDAPCPLGEDGLPVQGCWNK (SEQ ID NO: 235; |
| | GenBank Accession No. NP_001355824.1) |
| Homo sapiens | MVAERTHKAAATGARGPGELGAPGTVALVAARAERGARLPSPGSCGLLTLALCSLA |
| COL13A1, | LSLLAHFRTAELQARVLRLEAERGEQQMETAILGRVNQLLDEKWKLHSRRRREAPK |
| isoform 31 | TSPGCNCPPGPPGQPGTRGFPGFPGPIGLDGKPGHPGPKGDMGLTGPPGQPGPQGQ |
| | KGEKGQCGEYPHRLLPLLNSVRLAPPPVIKRRTFQGEQSQASIQGPPGPPGPPGPS |
| | GPLGHPGLPGPMGPPGLPGPPGPKGDPGIQGYHGRKGERGMPGMPGKHGAKGAPGI |
| | AVAGMKGEPGIPGTKGEKGAEGSPGLPGLLGQKGEKGDAGNSIGGGRGEPGPPGLP |
| | GPPGPKGEAGVDGQVGPPGQPGDKGERGAAGEQGPDGPKGSKGEPGKGEMVDYNGN |
| | INEALQEIRTLALMGPPGLPGQIGPPGAPGIPGQKGEIGLPGPPGHDGEKGPRGKP |
| | GDMGPPGPQGPPGKDGPPGVKGENGHPGSPGEKGEKGETGQAGSPGEKGEAGEKGN |
| | PGAEVPGLPGPEGPPGPPGLQGVPGPKGEAGLDGAKGEKGFQGEKGDRGPLGLPGT |
| | PGPIGVPGPAGPKGERGSKGDPGMTGPTGAAGLPGLHGPPGDKGNRGEDGLPVQGC |
| | WNK (SEQ ID NO: 236; GenBank Accession No. NP_001355827.1) |
| Homo sapiens | MVAERTHKAAATGARGPGELGAPGTVALVAARAERGARLPSPGSCGLLTLALCSLA |
| COL13A1, | LSLLAHFRTAELQARVLRLEAERGEQQMETAILGRVNQLLDEKWKLHSRRRREAPK |
| isoform 30 | TSPGCNCPPGPPGPTGRPGLPGQPGTRGFPGFPGPIGLDGKPGHPGPKGDMGLTGP |
| | PGQPGPQGQKGEKGQCGEYPHRLLPLLNSVRLAPPPVIKRRTFQGEQSQASIQGPP |
| | GPPGPPGPSGPLGHPGLPGPMGPPGLPGPPGPKGDPGIQGYHGRKGERGMPGMPGK |
| | HGAKGAPGIAVAGMKGEPGIPGTKGEKGAEGSPGLPGLLGQKGEKGDAGNSIGGGR |
| | GEPGPPGLPGPPGPKGEAGVDGQVGPPGQPGDKGERGAAGEQGPDGPKGSKGEPGK |
| | GEMVDYNGNINEALQEIRTLALMGPPGLPGQIGPPGAPGIPGQKGEIGLPGPPGHD |
| | GEKGPRGKPGDMGPPGPQGPPGKDGPPGVKGENGHPGSPGEKGEKGETGQAGSPGL |
| | QGVPGPKGEAGLDGAKGEKGFQGEKGDRGPLGLPGTPGPIGVPGPAGPKGERGSKG |
| | DPGMTGPTGAAGLPGLHGPPGDKGNRGHRGFKGEKGEPGLPGLDGLDAPCPLGEDG |
| | LPVQGCWNK (SEQ ID NO: 237; GenBank Accession No. NP_001355826.1) |
| Homo sapiens | MVAERTHKAAATGARGPGELGAPGTVALVAARAERGARLPSPGSCGLLTLALCSLA |
| COL13A1, | LSLLAHFRTAELQARVLRLEAERGEQQMETAILGRVNQLLDEKWKLHSRRRREAPK |
| isoform 29 | TSPGCNCPPGPPGQPGTRGFPGFPGPIGLDGKPGHPGPKGDMGLTGPPGQPGPQGQ |
| | KGEKGQCGEYPHRLLPLLNSVRLAPPPVIKRRTFQGEQSQASIQGPPGPPGPPGPS |
| | GPLGHPGLPGPMGPPGLPGPPGPKGDPGIQGYHGRKGERGMPGMPGKHGAKGAPGI |
| | AVAGMKGEPGIPGTKGEKGAEGSPGLPGLLGQKGEKGDAGNSIGGGRGEPGPPGLP |
| | GPPGPKGEAGVDGQVGPPGQPGDKGERGAAGEQGPDGPKGSKGEPGKGEMVDYNGN |
| | INEALQEIRTLALMGPPGLPGQIGPPGAPGIPGQKGEIGLPGPPGHDGEKGPRGKP |
| | GDMGPPGPQGPPGKDGPPGVKGENGHPGSPGEKGEKGETGQAGSPGLQGVPGPKGE |
| | AGLDGAKGEKGFQGEKGDRGPLGLPGASGLDGRPGPPGTPGPIGVPGPAGPKGERG |
| | SKGDPGMTGPTGAAGLPGLHGPPGDKGNRGHRGFKGEKGEPGLPGLDGLDAPCPLG |
| | EDGLPVQGCWNK (SEQ ID NO: 238; GenBank Accession No. NP_001355825.1) |
| Homo sapiens | MVAERTHKAAATGARGPGELGAPGTVALVAARAERGARLPSPGSCGLLTLALCSLA |
| COL13A1, | LSLLAHFRTAELQARVLRLEAERGEQQMETAILGRVNQLLDEKWKLHSRRRREAPK |
| isoform 25 | TSPGCNCPPGPPGPTGRPGLPGDKGAIGMPGRVGVKGQPGEKGSPGDAGLSIIGPR |
| | GPPGQPGTRGFPGFPGPIGLDGKPGHPGPKGDMGLTGPPGQPGPQGQKGEKGQCGE |
| | YPHRLLPLLNSVRLAPPPVIKRRTFQGEQSQASIQGPPGPPGPPGPSGPLGHPGLP |
| | GPMGPPGLPGPPGPKGDPGIQGYHGRKGERGMPGMPGKHGAKGAPGIAVAGMKGEP |
| | GIPGTKGEKGAEGSPGLPGLLGQKGEKGDAGNSIGGGRGEPGPPGLPGPPGPKGEA |
| | GVDGQVGPPGQPGDKGERGAAGEQGPDGPKGSKGEPGKGEMVDYNGNINEALQEIR |
| | TLALMGPPGLPGQIGPPGAPGIPGQKGEIGLPGPPGHDGEKGPRGKPGDMGPPGPQ |
| | GPPGKDGPPGVKGENGHPGSPGEKGEKGETGQAGSPGLQGVPGPKGEAGLDGAKGE |
| | KGFQGEKGDRGPLGLPGTPGPIGVPGPAGPKGERGSKGDPGMTGPTGAAGLPGLHG |
| | PPGDKGNRGERGKKGSRGPKGDKGDQGAPGLDAPCPLGEDGLPVQGCWNK (SEQ ID |
| | NO: 239; GenBank Accession No. NP_001355813.1) |
| Homo sapiens | MVAERTHKAAATGARGPGELGAPGTVALVAARAERGARLPSPGSCGLLTLALCSLA |
| COL13A1, | LSLLAHFRTAELQARVLRLEAERGEQQMETAILGRVNQLLDEKWKLHSRRRREAPK |
| isoform 24 | TSPGCNCPPGPPGPTGRPGLPGVKGQPGEKGSPGDAGLSIIGPRGPPGQPGTRGFP |
| | GFPGPIGLDGKPGHPGPKGDMGLTGPPGQPGPQGQKGEKGQCGEYPHRLLPLLNSV |
| | RLAPPPVIKRRTFQGEQSQASIQGPPGPPGPPGPSGPLGHPGLPGPMGPPGLPGPP |
| | GPKGDPGIQGYHGRKGERGMPGMPGKHGAKGAPGIAVAGMKGEPGIPGTKGDPGAE |
| | GKPGPPGLLGKRGQRGEKGAEGSPGLPGLLGQKGEKGDAGNSIGGGRGEPGPPGLP |
| | GPPGPKGEAGVDGQVGPPGQPGDKGERGAAGEQGPDGPKGSKGEPGKGEMVDYNGN |
| | INEALQEIRTLALMGPPGLPGQIGPPGAPGIPGQKGEIGLPGPPGHDGEKGPRGKP |
| | GDMGPPGPQGPPGKDGPPGVKGENGHPGSPGEKGEKGETGQAGSPGLQGVPGPKGE |
| | AGLDGAKGEKGFQGEKGDRGPLGLPGASGLDGRPGPPGTPGPIGVPGPAGPKGERG |
| | SKGDPGMTGPTGAAGLPGLHGPPGDKGNRGHRGFKGEKGEPGLPGLDGLDAPCPLG |
| | EDGLPVQGCWNK (SEQ ID NO: 240; GenBank Accession No. NP_001355812.1) |
| Homo sapiens | MVAERTHKAAATGARGPGELGAPGTVALVAARAERGARLPSPGSCGLLTLALCSLA |
| COL13A1, | LSLLAHFRTAELQARVLRLEAERGEQQMETAILGRVNQLLDEKWKLHSRRRREAPK |
| isoform 21 | TSPGCNCPPGPPGQPGTRGFPGFPGPIGLDGKPGHPGPKGDMGLTGPPGQPGPQGQ |
| | KGEKGQCGEYPHRLLPLLNSVRLAPPPVIKRRTFQGEQSQASIQGPPGPPGPPGPS |
| | GPLGHPGLPGPMGPPGLPGPPGPKGDPGIQGYHGRKGERGMPGMPGKHGAKGAPGI |
| | AVAGMKGEPGIPGTKGEKGAEGSPGLPGLLGQKGEKGDAGNSIGGGRGEPGPPGLP |
| | GPPGPKGEAGVDGQVGPPGQPGDKGERGAAGEQGPDGPKGSKGEPGKGEMVDYNGN |
| | INEALQEIRTLALMGPPGLPGQIGPPGAPGIPGQKGEIGLPGPPGHDGEKGPRGKP |
| | GDMGPPGPQGPPGKDGPPGVKGENGHPGSPGEKGEKGETGQAGSPVPGLPGPEGPP |
| | GPPGLQGVPGPKGEAGLDGAKGEKGFQGEKGDRGPLGLPGASGLDGRPGPPGTPGP |
| | IGVPGPAGPKGERGSKGDPGMTGPTGAAGLPGLHGPPGDKGNRGERGKKGSRGPKG |
| | DKGDQGAPGLDAPCPLGEDGLPVQGCWNK (SEQ ID NO: 241; GenBank Accession |
| | No. NP_542988.3) |
| Homo sapiens | MVAERTHKAAATGARGPGELGAPGTVALVAARAERGARLPSPGSCGLLTLALCSLA |
| COL13A1, | LSLLAHFRTAELQARVLRLEAERGEQQMETAILGRVNQLLDEKWKLHSRRRREAPK |
| isoform 11 | TSPGCNCPPGPPGPTGRPGLPGDKGAIGMPGRVGSPGDAGLSIIGPRGPPGQPGTR |
| | GFPGFPGPIGLDGKPGHPGPKGDMGLTGPPGQPGPQGQKGEKGQCGEYPHRLLPLL |
| | NSVRLAPPPVIKRRTFQGEQSQASIQGPPGPPGPPGPSGPLGHPGLPGPMGPPGLP |
| | GPPGPKGDPGIQGYHGRKGERGMPGMPGKHGAKGAPGIAVAGMKGEPGIPGTKGEK |
| | GAEGSPGLPGLLGQKGEKGDAGNSIGGGRGEPGPPGLPGPPGPKGEAGVDGQVGPP |
| | GQPGDKGERGAAGEQGPDGPKGSKGEPGKGEMVDYNGNINEALQEIRTLALMGPPG |
| | LPGQIGPPGAPGIPGQKGEIGLPGPPGHDGEKGPRGKPGDMGPPGPQGPPGKDGPP |
| | GVKGENGHPGSPGEKGEKGETGQAGSPGEKGEAGEKGNPGAEVPGLPGPEGPPGPP |
| | GLQGVPGPKGEAGLDGAKGEKGFQGEKGDRGPLGLPGTPGPIGVPGPAGPKGERGS |
| | KGDPGMTGPTGAAGLPGLHGPPGDKGNRGERGKKGSRGPKGDKGDQGAPGLDAPCP |
| | LGEDGLPVQGCWNK (SEQ ID NO: 242; GenBank Accession No. NP_542990.3) |
| Homo sapiens | MVAERTHKAAATGARGPGELGAPGTVALVAARAERGARLPSPGSCGLLTLALCSLA |
| COL13A1, | LSLLAHFRTAELQARVLRLEAERGEQQMETAILGRVNQLLDEKWKLHSRRRREAPK |
| isoform 15 | TSPGCNCPPGPPGPTGRPGLPGDKGAIGMPGRVGSPGDAGLSIIGPRGPPGQPGTR |
| | GFPGFPGPIGLDGKPGHPGPKGDMGLTGPPGQPGPQGQKGEKGQCGEYPHRECLSS |
| | MPAALRSSQIIALKGEQSQASIQGPPGPPGPPGPSGPLGHPGLPGPMGPPGLPGPP |
| | GPKGDPGIQGYHGRKGERGMPGMPGKHGAKGAPGIAVAGMKGEPGIPGTKGEKGAE |
| | GSPGLPGLLGQKGEKGDAGNSIGGGRGEPGPPGLPGPPGPKGEAGVDGQVGPPGQP |
| | GDKGERGAAGEQGPDGPKGSKGEPGKGEMVDYNGNINEALQEIRTLALMGPPGLPG |
| | QIGPPGAPGIPGQKGEIGLPGPPGHDGEKGPRGKPGDMGPPGPQGPPGKDGPPGVK |
| | GENGHPGSPGEKGEKGETGQAGSPVPGLPGPEGPPGPPGLQGVPGPKGEAGLDGAK |
| | GEKGFQGEKGDRGPLGLPGTPGPIGVPGPAGPKGERGSKGDPGMTGPTGAAGLPGL |
| | HGPPGDKGNRGERGKKGSRGPKGDKGDQGAPGLDAPCPLGEDGLPVQGCWNK (SEQ |
| | ID NO: 243; GenBank Accession No. NP_542992.3) |
| Homo sapiens | MVAERTHKAAATGARGPGELGAPGTVALVAARAERGARLPSPGSCGLLTLALCSLA |
| COL13A1, | LSLLAHFRTAELQARVLRLEAERGEQQMETAILGRVNQLLDEKWKLHSRRRREAPK |
| isoform 19 | TSPGCNCPPGPPGPTGRPGLPGQPGTRGFPGFPGPIGLDGKPGHPGPKGDMGLTGP |
| | PGQPGPQGQKGEKGQCGEYPHRECLSSMPAALRSSQIIALKGEQSQASIQGPPGPP |
| | GPPGPSGPLGHPGLPGPMGPPGLPGPPGPKGDPGIQGYHGRKGERGMPGMPGKHGA |
| | KGAPGIAVAGMKGEPGIPGTKGEKGAEGSPGLPGLLGQKGEKGDAGNSIGGGRGEP |
| | GPPGLPGPPGPKGEAGVDGQVGPPGQPGDKGERGAAGEQGPDGPKGSKGEPGKGEM |
| | VDYNGNINEALQEIRTLALMGPPGLPGQIGPPGAPGIPGQKGEIGLPGPPGHDGEK |
| | GPRGKPGDMGPPGPQGPPGKDGPPGVKGENGHPGSPGEKGEKGETGQAGSPVPGLP |
| | GPEGPPGPPGLQGVPGPKGEAGLDGAKGEKGFQGEKGDRGPLGLPGTPGPIGVPGP |
| | AGPKGERGSKGDPGMTGPTGAAGLPGLHGPPGDKGNRGEDGLPVQGCWNK (SEQ ID |
| | NO: 244; GenBank Accession No. NP_542995.3) |
| Homo sapiens | MVAERTHKAAATGARGPGELGAPGTVALVAARAERGARLPSPGSCGLLTLALCSLA |
| COL13A1, | LSLLAHFRTAELQARVLRLEAERGEQQMETAILGRVNQLLDEKWKLHSRRRREAPK |
| isoform 5 | TSPGCNCPPGPPGPTGRPGLPGDKGAIGMPGRVGSPGDAGLSIIGPRGPPGQPGTR |
| | GFPGFPGPIGLDGKPGHPGPKGDMGLTGPPGQPGPQGQKGEKGQCGEYPHRECLSS |
| | MPAALRSSQIIALKGEQSQASIQGPPGPPGPPGPSGPLGHPGLPGPMGPPGLPGPP |
| | GPKGDPGIQGYHGRKGERGMPGMPGKHGAKGAPGIAVAGMKGEPGIPGTKGEKGAE |
| | GSPGLPGLLGQKGEKGDAGNSIGGGRGEPGPPGLPGPPGPKGEAGVDGQVGPPGQP |
| | GDKGERGAAGEQGPDGPKGSKGEPGKGEMVDYNGNINEALQEIRTLALMGPPGLPG |
| | QIGPPGAPGIPGQKGEIGLPGPPGHDGEKGPRGKPGDMGPPGPQGPPGKDGPPGVK |
| | GENGHPGSPGEKGEKGETGQAGSPGEKGEAGEKGNPGAEVPGLPGPEGPPGPPGLQ |
| | GVPGPKGEAGLDGAKGEKGFQGEKGDRGPLGLPGASGLDGRPGPPGTPGPIGVPGP |
| | AGPKGERGSKGDPGMTGPTGAAGLPGLHGPPGDKGNRGERGKKGSRGPKGDKGDQG |
| | APGLDAPCPLGEDGLPVQGCWNK (SEQ ID NO: 245; GenBank Accession No. |
| | NP_542991.3) |
| Homo sapiens | MVAERTHKAAATGARGPGELGAPGTVALVAARAERGARLPSPGSCGLLTLALCSLA |
| COL13A1, | LSLLAHFRTAELQARVLRLEAERGEQQMETAILGRVNQLLDEKWKLHSRRRREAPK |
| isoform 1 | TSPGCNCPPGPPGPTGRPGLPGDKGAIGMPGRVGSPGDAGLSIIGPRGPPGQPGTR |
| | GFPGFPGPIGLDGKPGHPGPKGDMGLTGPPGQPGPQGQKGEKGQCGEYPHRECLSS |
| | MPAALRSSQIIALKLLPLLNSVRLAPPPVIKRRTFQGEQSQASIQGPPGPPGPPGP |
| | SGPLGHPGLPGPMGPPGLPGPPGPKGDPGIQGYHGRKGERGMPGMPGKHGAKGAPG |
| | IAVAGMKGEPGIPGTKGEKGAEGSPGLPGLLGQKGEKGDAGNSIGGGRGEPGPPGL |
| | PGPPGPKGEAGVDGQVGPPGQPGDKGERGAAGEQGPDGPKGSKGEPGKGEMVDYNG |
| | NINEALQEIRTLALMGPPGLPGQIGPPGAPGIPGQKGEIGLPGPPGHDGEKGPRGK |
| | PGDMGPPGPQGPPGKDGPPGVKGENGHPGSPGEKGEKGETGQAGSPGEKGEAGEKG |
| | NPGAEVPGLPGPEGPPGPPGLQGVPGPKGEAGLDGAKGEKGFQGEKGDRGPLGLPG |
| | ASGLDGRPGPPGTPGPIGVPGPAGPKGERGSKGDPGMTGPTGAAGLPGLHGPPGDK |
| | GNRGERGKKGSRGPKGDKGDQGAPGLDAPCPLGEDGLPVQGCWNK (SEQ ID |
| | NO: 246; GenBank Accession No. NP_001123575.1) |
| Homo sapiens | MKIFQRKMRYWLLPPFLAIVYFCTIVQGQVAPPTRLRYNVISHDSIQISWKAPRGK |
| collagen type | FGGYKLLVTPTSGGKTNQLNLQNTATKAIIQGLMPDQNYTVQIIAYNKDKESKPAQ |
| XIV, alpha chain | GQFRIKDLEKRKDPKPRVKVVDRGNGSRPSSPEEVKFVCQTPAIADIVILVDGSWS |
| 1 (COL14A1) | IGRFNFRLVRHFLENLVTAFDVGSEKTRIGLAQYSGDPRIEWHLNAFSTKDEVIEA |
| precursor | VRNLPYKGGNTLTGLALNYIFENSFKPEAGSRTGVSKIGILITDGKSQDDIIPPSR |
| | NLRESGVELFAIGVKNADVNELQEIASEPDSTHVYNVAEFDLMHTVVESLTRTLCS |
| | RVEEQDREIKASAHAITGPPTELITSEVTARSFMVNWTHAPGNVEKYRVVYYPTRG |
| | GKPDEVVVDGTVSSTVLKNLMSLTEYQIAVFAIYAHTASEGLRGTETTLALPMASD |
| | LLLYDVTENSMRVKWDAVPGASGYLILYAPLTEGLAGDEKEMKIGETHTDIELSGL |
| | LPNTEYTVTVYAMFGEEASDPVTGQETTLALSPPRNLRISNVGSNSARLTWDPTSR |
| | QINGYRIVYNNADGTEINEVEVDPITTFPLKGLTPLTEYTTATFSIYDEGQSEPLT |
| | GVFTTEEVPAQQYLEIDEVTTDSFRVTWHPLSADEGLHKLMWIPVYGGKTEEVVLK |
| | EEQDSHVIEGLEPGTEYEVSLLAVLDDGSESEVVTAVGTTLDSFWTEPATTIVPTT |
| | SVTSVFQTGIRNLVVGDETTSSLRVKWDISDSDVQQFRVTYMTAQGDPEEEVIGTV |
| | MVPGSQNNLLLKPLLPDTEYKVTVTPIYTDGEGVSVSAPGKTLPSSGPQNLRVSEE |
| | WYNRLRITWDPPSSPVKGYRIVYKPVSVPGPTLETFVGADINTILITNLLSGMDYN |
| | VKIFASQASGFSDALTGMVKTLFLGVTNLQAKHVEMTSLCAHWQVHRHATAYRVVI |
| | ESLQDRQKQESTVGGGTTRHCFYGLQPDSEYKISVYTKLQEIEGPSVSIMEKTQSL |
| | PTRPPTFPPTIPPAKEVCKAAKADLVFMVDGSWSIGDENFNKIISFLYSTVGALNK |
| | IGTDGTQVAMVQFTDDPRTEFKLNAYKTKETLLDAIKHISYKGGNTKTGKAIKYVR |
| | DTLFTAESGTRRGIPKVIVVITDGRSQDDVNKISREMQLDGYSIFAIGVADADYSE |
| | INSIGSKPSARHVFFVDDFDAFKKIEDELITFVCETASATCPVVHKDGIDLAGFKM |
| | MEMFGLVEKDFSSVEGVSMEPGTFNVFPCYQLHKDALVSQPTRYLHPEGLPSDYTI |
| | SFLFRILPDTPQEPFALWEILNKNSDPLVGVILDNGGKTLTYFNYDQSGDFQTVTF |
| | EGPEIRKIFYGSFHKLHIVVSETLVKVVIDCKQVGEKAMNASANITSDGVEVLGKM |
| | VRSRGPGGNSAPFQLQMFDIVCSTSWANTDKCCELPGLRDDESCPDLPHSCSCSET |
| | NEVALGPAGPPGGPGLRGPKGQQGEPGPKGPDGPRGEIGLPGPQGPPGPQGPSGLS |
| | IQGMPGMPGEKGEKGDTGLPGPQGIPGGVGSPGRDGSPGQRGLPGKDGSSGPPGPP |
| | GPIGIPGTPGVPGITGSMGPQGALGPPGVPGAKGERGERGDLQSQAMVRSVARQVC |
| | EQLIQSHMARYTAILNQIPSHSSSIRTVQGPPGEPGRPGSPGAPGEQGPPGTPGFP |
| | GNAGVPGTPGERGLTGIKGEKGNPGVGTQGPRGPPGPAGPSGESRPGSPGPPGSPG |
| | PRGPPGHLGVPGPQGPSGQPGYCDPSSCSAYGVRAPHPDQPEFTPVQDELEAMELW |
| | GPGV (SEQ ID NO: 247; GenBank Accession No. NP_066933.1) |
| Homo sapiens | MWVSWAPGLWLLGLWATFGHGANTGAQCPPSQQEGLKLEHSSSLPANVTGFNLIHR |
| collagen type | LSLMKTSAIKKIRNPKGPLILRLGAAPVTQPTRRVFPRGLPEEFALVLTLLLKKHT |
| XVI, alpha chain | HQKTWYLFQVTDANGYPQISLEVNSQERSLELRAQGQDGDFVSCIFPVPQLFDLRW |
| 1 | HKLMLSVAGRVASVHVDCSSASSQPLGPRRPMRPVGHVFLGLDAEQGKPVSFDLQQ |
| (COL16A1), | VHIYCDPELVLEEGCCEILPAGCPPETSKARRDTQSNELIEINPQSEGKVYTRCFC |
| precursor | LEEPQNSEVDAQLTGRISQKAERGAKVHQETAADECPPCVHGARDSNVTLAPSGPK |
| | GGKGERGLPGPPGSKGEKGARGNDCVRISPDAPLQCAEGPKGEKGESGALGPSGLP |
| | GSTGEKGQKGEKGDGGIKGVPGKPGRDGRPGEICVIGPKGQKGDPGFVGPEGLAGE |
| | PGPPGLPGPPGIGLPGTPGDPGGPPGPKGDKGSSGIPGKEGPGGKPGKPGVKGEKG |
| | DPCEVCPTLPEGFQNFVGLPGKPGPKGEPGDPVPARGDPGIQGIKGEKGEPCLSCS |
| | SVVGAQHLVSSTGASGDVGSPGFGLPGLPGRAGVPGLKGEKGNFGEAGPAGSPGPP |
| | GPVGPAGIKGAKGEPCEPCPALSNLQDGDVRVVALPGPSGEKGEPGPPGFGLPGKQ |
| | GKAGERGLKGQKGDAGNPGDPGTPGTTGRPGLSGEPGVQGPAGPKGEKGDGCTACP |
| | SLQGTVTDMAGRPGQPGPKGEQGPEGVGRPGKPGQPGLPGVQGPPGLKGVQGEPGP |
| | PGRGVQGPQGEPGAPGLPGIQGLPGPRGPPGPTGEKGAQGSPGVKGATGPVGPPGA |
| | SVSGPPGRDGQQGQTGLRGTPGEKGPRGEKGEPGECSCPSQGDLIFSGMPGAPGLW |
| | MGSSWQPGPQGPPGIPGPPGPPGVPGLQGVPGNNGLPGQPGLTAELGSLPIEQHLL |
| | KSICGDCVQGQRAHPGYLVEKGEKGDQGIPGVPGLDNCAQCFLSLERPRAEEARGD |
| | NSEGDPGCVGSPGLPGPPGLPGQRGEEGPPGMRGSPGPPGPIGPPGFPGAVGSPGL |
| | PGLQGERGLTGLTGDKGEPGPPGQPGYPGATGPPGLPGIKGERGYTGSAGEKGEPG |
| | PPGSEGLPGPPGPAGPRGERGPQGNSGEKGDQGFQGQPGFPGPPGPPGFPGKVGSP |
| | GPPGPQAEKGSEGIRGPSGLPGSPGPPGPPGIQGPAGLDGLDGKDGKPGLRGDPGP |
| | AGPPGLMGPPGFKGKTGHPGLPGPKGDCGKPGPPGSTGRPGAEGEPGAMGPQGRPG |
| | PPGHVGPPGPPGQPGPAGISAVGLKGDRGATGERGLAGLPGQPGPPGHPGPPGEPG |
| | TDGAAGKEGPPGKQGFYGPPGPKGDPGAAGQKGQAGEKGRAGMPGGPGKSGSMGPV |
| | GPPGPAGERGHPGAPGPSGSPGLPGVPGSMGDMVNYDEIKRFIRQEIIKMFDERMA |
| | YYTSRMQFPMEMAAAPGRPGPPGKDGAPGRPGAPGSPGLPGQIGREGRQGLPGVRG |
| | LPGTKGEKGDIGIGIAGENGLPGPPGPQGPPGYGKMGATGPMGQQGIPGIPGPPGP |
| | MGQPGKAGHCNPSDCFGAMPMEQQYPPMKTMKGPFG (SEQ ID NO: 248; GenBank |
| | Accession No. NP_001847.3) |
| Homo sapiens | MDVTKKNKRDGTEVTERIVTETVTTRLTSLPPKGGTSNGYAKTASLGGGSRLEKQS |
| collagen type | LTHGSSGYINSTGSTRGHASTSSYRRAHSPASTLPNSPGSTFERKTHVTRHAYEGS |
| XVII, alpha | SSGNSSPEYPRKEFASSSTRGRSQTRESEIRVRLQSASPSTRWTELDDVKRLLKGS |
| chain 1 | RSASVSPTRNSSNTLPIPKKGTVETKIVTASSQSVSGTYDATILDANLPSHVWSST |
| (COL17A1) | LPAGSSMGTYHNNMTTQSSSLLNTNAYSAGSVFGVPNNMASCSPTLHPGLSTSSSV |
| | FGMQNNLAPSLTTLSHGTTTTSTAYGVKKNMPQSPAAVNTGVSTSAACTTSVQSDD |
| | LLHKDCKFLILEKDNTPAKKEMELLIMTKDSGKVFTASPASIAATSFSEDTLKKEK |
| | QAAYNADSGLKAEANGDLKTVSTKGKTTTADIHSYGSSGGGGSGGGGGVGGAGGGP |
| | WGPAPAWCPCGSCCSWWKWLLGLLLTWLLLLGLLFGLIALAEEVRKLKARVDELER |
| | IRRSILPYGDSMDRIEKDRLQGMAPAAGADLDKIGLHSDSQEELWMFVRKKLMMEQ |
| | ENGNLRGSPGPKGDMGSPGPKGDRGFPGTPGIPGPLGHPGPQGPKGQKGSVGDPGM |
| | EGPMGQRGREGPMGPRGEAGPPGSGEKGERGAAGEPGPHGPPGVPGSVGPKGSSGS |
| | PGPQGPPGPVGLQGLRGEVGLPGVKGDKGPMGPPGPKGDQGEKGPRGLTGEPGMRG |
| | LPGAVGEPGAKGAMGPAGPDGHQGPRGEQGLTGMPGIRGPPGPSGDPGKPGLTGPQ |
| | GPQGLPGTPGRPGIKGEPGAPGKIVTSEGSSMLTVPGPPGPPGAMGPPGPPGAPGP |
| | AGPAGLPGHQEVLNLQGPPGPPGPRGPPGPSIPGPPGPRGPPGEGLPGPPGPPGSF |
| | LSNSETFLSGPPGPPGPPGPKGDQGPPGPRGHQGEQGLPGFSTSGSSSFGLNLQGP |
| | PGPPGPQGPKGDKGDPGVPGALGIPSGPSEGGSSSTMYVSGPPGPPGPPGPPGSIS |
| | SSGQEIQQYISEYMQSDSIRSYLSGVQGPPGPPGPPGPVTTITGETFDYSELASHV |
| | VSYLRTSGYGVSLFSSSISSEDILAVLQRDDVRQYLRQYLMGPRGPPGPPGASGDG |
| | SLLSLDYAELSSRILSYMSSSGISIGLPGPPGPPGLPGTSYEELLSLLRGSEFRGI |
| | VGPPGPPGPPGIPGNVWSSISVEDLSSYLHTAGLSFIPGPPGPPGPPGPRGPPGVS |
| | GALATYAAENSDSFRSELISYLTSPDVRSFIVGPPGPPGPQGPPGDSRLLSTDASH |
| | SRGSSSSSHSSSVRRGSSYSSSMSTGGGGAGSLGAGGAFGEAAGDRGPYGTDIGPG |
| | GGYGAAAEGGMYAGNGGLLGADFAGDLDYNELAVRVSESMQRQGLLQGMAYTVQGP |
| | PGQPGPQGPPGISKVFSAYSNVTADLMDFFQTYGAIQGPPGQKGEMGTPGPKGDRG |
| | PAGPPGHPGPPGPRGHKGEKGDKGDQVYAGRRRRRSIAVKP (SEQ ID NO: 249; |
| | GenBank Accession No. NP_000485.3) |
| Homo sapiens | MAPYPCGCHILLLLFCCLAAARANLLNLNWLWFNNEDTSHAATTIPEPQGPLPVQP |
| collagen type | TADTTTHVTPRNGSTEPATAPGSPEPPSELLEDGQDTPTSAESPDAPEENIAGVGA |
| XVIII, alpha | EILNVAKGIRSFVQLWNDTVPTESLARAETLVLETPVGPLALAGPSSTPQENGTTL |
| chain 1 | WPSRGIPSSPGAHTTEAGTLPAPTPSPPSLGRPWAPLTGPSVPPPSSERISEEVGL |
| (COL18A1) | LQLLGDPPPQQVTQTDDPDVGLAYVFGPDANSGQVARYHFPSLFFRDFSLLFHIRP |
| isoform 1 | ATEGPGVLFAITDSAQAMVLLGVKLSGVQDGHQDISLLYTEPGAGQTHTAASFRLP |
| preprotein | AFVGQWTHLALSVAGGFVALYVDCEEFQRMPLARSSRGLELEPGAGLFVAQAGGAD |
| | PDKFQGVIAELKVRRDPQVSPMHCLDEEGDDSDGASGDSGSGLGDARELLREETGA |
| | ALKPRLPAPPPVTTPPLAGGSSTEDSRSEEVEEQTTVASLGAQTLPGSDSVSTWDG |
| | SVRTPGGRVKEGGLKGQKGEPGVPGPPGRAGPPGSPCLPGPPGLPCPVSPLGPAGP |
| | ALQTVPGPQGPPGPPGRDGTPGRDGEPGDPGEDGKPGDTGPQGFPGTPGDVGPKGD |
| | KGDPGVGERGPPGPQGPPGPPGPSFRHDKLTFIDMEGSGFGGDLEALRGPRGFPGP |
| | PGPPGVPGLPGEPGRFGVNSSDVPGPAGLPGVPGREGPPGFPGLPGPPGPPGREGP |
| | PGRTGQKGSLGEAGAPGHKGSKGAPGPAGARGESGLAGAPGPAGPPGPPGPPGPPG |
| | PGLPAGFDDMEGSGGPFWSTARSADGPQGPPGLPGLKGDPGVPGLPGAKGEVGADG |
| | VPGFPGLPGREGIAGPQGPKGDRGSRGEKGDPGKDGVGQPGLPGPPGPPGPVVYVS |
| | EQDGSVLSVPGPEGRPGFAGFPGPAGPKGNLGSKGERGSPGPKGEKGEPGSIFSPD |
| | GGALGPAQKGAKGEPGFRGPPGPYGRPGYKGEIGFPGRPGRPGMNGLKGEKGEPGD |
| | ASLGFGMRGMPGPPGPPGPPGPPGTPVYDSNVFAESSRPGPPGLPGNQGPPGPKGA |
| | KGEVGPPGPPGQFPFDFLQLEAEMKGEKGDRGDAGQKGERGEPGGGGFFGSSLPGP |
| | PGPPGPRGYPGIPGPKGESIRGQPGPPGPQGPPGIGYEGRQGPPGPPGPPGPPSFP |
| | GPHRQTISVPGPPGPPGPPGPPGTMGASSGVRLWATRQAMLGQVHEVPEGWLIFVA |
| | EQEELYVRVQNGFRKVQLEARTPLPRGTDNEVAALQPPVVQLHDSNPYPRREHPHP |
| | TARPWRADDILASPPRLPEPQPYPGAPHHSSYVHLRPARPTSPPAHSHRDFQPVLH |
| | LVALNSPISGGMRGIRGADFQCFQQARAVGLAGTFRAFLSSRLQDLYSIVRRADRA |
| | AVPIVNLKDELLFPSWEALFSGSEGPLKPGARIFSFDGKDVLRHPTWPQKSVWHGS |
| | DPNGRRLTESYCETWRTEAPSATGQASSLLGGRLLGQSAASCHHAYIVLCIENSFM |
| | TASK (SEQ ID NO: 250; GenBank Accession No. NP_085059.2) |
| Homo sapiens | MAPRCPWPWPRRRRLLDVLAPLVLLLGVRAASAEPERISEEVGLLQLLGDPPPQQV |
| COL18A1, | TQTDDPDVGLAYVFGPDANSGQVARYHFPSLFFRDFSLLFHIRPATEGPGVLFAIT |
| isoform | DSAQAMVLLGVKLSGVQDGHQDISLLYTEPGAGQTHTAASFRLPAFVGQWTHLALS |
| 2preprotein | VAGGFVALYVDCEEFQRMPLARSSRGLELEPGAGLFVAQAGGADPDKFQGVIAELK |
| | VRRDPQVSPMHCLDEEGDDSDGASGDSGSGLGDARELLREETGAALKPRLPAPPPV |
| | TTPPLAGGSSTEDSRSEEVEEQTTVASLGAQTLPGSDSVSTWDGSVRTPGGRVKEG |
| | GLKGQKGEPGVPGPPGRAGPPGSPCLPGPPGLPCPVSPLGPAGPALQTVPGPQGPP |
| | GPPGRDGTPGRDGEPGDPGEDGKPGDTGPQGFPGTPGDVGPKGDKGDPGVGERGPP |
| | GPQGPPGPPGPSFRHDKLTFIDMEGSGFGGDLEALRGPRGFPGPPGPPGVPGLPGE |
| | PGRFGVNSSDVPGPAGLPGVPGREGPPGFPGLPGPPGPPGREGPPGRTGQKGSLGE |
| | AGAPGHKGSKGAPGPAGARGESGLAGAPGPAGPPGPPGPPGPPGPGLPAGFDDMEG |
| | SGGPFWSTARSADGPQGPPGLPGLKGDPGVPGLPGAKGEVGADGVPGFPGLPGREG |
| | IAGPQGPKGDRGSRGEKGDPGKDGVGQPGLPGPPGPPGPVVYVSEQDGSVLSVPGP |
| | EGRPGFAGFPGPAGPKGNLGSKGERGSPGPKGEKGEPGSIFSPDGGALGPAQKGAK |
| | GEPGFRGPPGPYGRPGYKGEIGFPGRPGRPGMNGLKGEKGEPGDASLGFGMRGMPG |
| | PPGPPGPPGPPGTPVYDSNVFAESSRPGPPGLPGNQGPPGPKGAKGEVGPPGPPGQ |
| | FPFDFLQLEAEMKGEKGDRGDAGQKGERGEPGGGGFFGSSLPGPPGPPGPRGYPGI |
| | PGPKGESIRGQPGPPGPQGPPGIGYEGRQGPPGPPGPPGPPSFPGPHRQTISVPGP |
| | PGPPGPPGPPGTMGASSGVRLWATRQAMLGQVHEVPEGWLIFVAEQEELYVRVQNG |
| | FRKVQLEARTPLPRGTDNEVAALQPPVVQLHDSNPYPRREHPHPTARPWRADDILA |
| | SPPRLPEPQPYPGAPHHSSYVHLRPARPTSPPAHSHRDFQPVLHLVALNSPLSGGM |
| | RGIRGADFQCFQQARAVGLAGTFRAFLSSRLQDLYSIVRRADRAAVPIVNLKDELL |
| | FPSWEALFSGSEGPLKPGARIFSFDGKDVLRHPTWPQKSVWHGSDPNGRRLTESYC |
| | ETWRTEAPSATGQASSLLGGRLLGQSAASCHHAYIVLCIENSFMTASK (SEQ ID |
| | NO: 251; GenBank Accession No. NP_569712.2) |
| Homo sapiens | MAPYPCGCHILLLLFCCLAAARANLLNLNWLWFNNEDTSHAATTIPEPQGPLPVQP |
| COL18A1, | TADTTTHVTPRNGSTEPATAPGSPEPPSELLEDGQDTPTSAESPDAPEENIAGVGA |
| isoform | EILNVAKGIRSFVQLWNDTVPTESLARAETLVLETPVGPLALAGPSSTPQENGTTL |
| 3preprotein | WPSRGIPSSPGAHTTEAGTLPAPTPSPPSLGRPWAPLTGPSVPPPSSGRASLSSLL |
| | GGAPPWGSLQDPDSQGLSPAAAAPSQQLQRPDVRLRTPLLHPLVMGSLGKHAAPSA |
| | FSSGLPGALSQVAVTTLTRDSGAWVSHVANSVGPGLANNSALLGADPEAPAGRCLP |
| | LPPSLPVCGHLGISRFWLPNHLHHESGEQVRAGARAWGGLLQTHCHPFLAWFFCLL |
| | LVPPCGSVPPPAPPPCCQFCEALQDACWSRLGGGRLPVACASLPTQEDGYCVLIGP |
| | AAERISEEVGLLQLLGDPPPQQVTQTDDPDVGLAYVFGPDANSGQVARYHFPSLFF |
| | RDFSLLFHIRPATEGPGVLFAITDSAQAMVLLGVKLSGVQDGHQDISLLYTEPGAG |
| | QTHTAASFRLPAFVGQWTHLALSVAGGFVALYVDCEEFQRMPLARSSRGLELEPGA |
| | GLFVAQAGGADPDKFQGVIAELKVRRDPQVSPMHCLDEEGDDSDGASGDSGSGLGD |
| | ARELLREETGAALKPRLPAPPPVTTPPLAGGSSTEDSRSEEVEEQTTVASLGAQTL |
| | PGSDSVSTWDGSVRTPGGRVKEGGLKGQKGEPGVPGPPGRAGPPGSPCLPGPPGLP |
| | CPVSPLGPAGPALQTVPGPQGPPGPPGRDGTPGRDGEPGDPGEDGKPGDTGPQGFP |
| | GTPGDVGPKGDKGDPGVGERGPPGPQGPPGPPGPSFRHDKLTFIDMEGSGFGGDLE |
| | ALRGPRGFPGPPGPPGVPGLPGEPGRFGVNSSDVPGPAGLPGVPGREGPPGFPGLP |
| | GPPGPPGREGPPGRTGQKGSLGEAGAPGHKGSKGAPGPAGARGESGLAGAPGPAGP |
| | PGPPGPPGPPGPGLPAGFDDMEGSGGPFWSTARSADGPQGPPGLPGLKGDPGVPGL |
| | PGAKGEVGADGVPGFPGLPGREGIAGPQGPKGDRGSRGEKGDPGKDGVGQPGLPGP |
| | PGPPGPVVYVSEQDGSVLSVPGPEGRPGFAGFPGPAGPKGNLGSKGERGSPGPKGE |
| | KGEPGSIFSPDGGALGPAQKGAKGEPGFRGPPGPYGRPGYKGEIGFPGRPGRPGMN |
| | GLKGEKGEPGDASLGFGMRGMPGPPGPPGPPGPPGTPVYDSNVFAESSRPGPPGLP |
| | GNQGPPGPKGAKGEVGPPGPPGQFPFDFLQLEAEMKGEKGDRGDAGQKGERGEPGG |
| | GGFFGSSLPGPPGPPGPRGYPGIPGPKGESIRGQPGPPGPQGPPGIGYEGRQGPPG |
| | PPGPPGPPSFPGPHRQTISVPGPPGPPGPPGPPGTMGASSGVRLWATRQAMLGQVH |
| | EVPEGWLIFVAEQEELYVRVQNGFRKVQLEARTPLPRGTDNEVAALQPPVVQLHDS |
| | NPYPRREHPHPTARPWRADDILASPPRLPEPQPYPGAPHHSSYVHLRPARPTSPPA |
| | HSHRDFQPVLHLVALNSPLSGGMRGIRGADFQCFQQARAVGLAGTFRAFLSSRLQD |
| | LYSIVRRADRAAVPIVNLKDELLFPSWEALFSGSEGPLKPGARIFSFDGKDVLRHP |
| | TWPQKSVWHGSDPNGRRLTESYCETWRTEAPSATGQASSLLGGRLLGQSAASCHHA |
| | YIVLCIENSFMTASK (SEQ ID NO: 252; GenBank Accession No. NP_569711.2) |
| Homo sapiens | MRLTGPWKLWLWMSIFLLPASTSVTVRDKTEESCPILRIEGHQLTYDNINKLEVSG |
| collagen type | FDLGDSFSLRRAFCESDKTCFKLGSALLIRDTIKIFPKGLPEEYSVAAMFRVRRNA |
| XIX, alpha chain | KKERWFLWQVLNQQNIPQISIVVDGGKKVVEFMFQATEGDVLNYIFRNRELRPLFD |
| 1 (COL19A1) | RQWHKLGISIQSQVISLYMDCNLIARRQTDEKDTVDFHGRTVIATRASDGKPVDIE |
| | LHQLKIYCSANLIAQETCCEISDTKCPEQDGFGNIASSWVTAHASKMSSYLPAKQE |
| | LKDQCQCIPNKGEAGLPGAPGSPGQKGHKGEPGENGLHGAPGFPGQKGEQGFEGSK |
| | GETGEKGEQGEKGDPALAGLNGENGLKGDLGPHGPPGPKGEKGDTGPPGPPALPGS |
| | LGIQGPQGPPGKEGQRGRRGKTGPPGKPGPPGPPGPPGIQGIHQTLGGYYNKDNKG |
| | NDEHEAGGLKGDKGETGLPGFPGSVGPKGQKGEPGEPFTKGEKGDRGEPGVIGSQG |
| | VKGEPGDPGPPGLIGSPGLKGQQGSAGSMGPRGPPGDVGLPGEHGIPGKQGIKGEK |
| | GDPGGIIGPPGLPGPKGEAGPPGKSLPGEPGLDGNPGAPGPRGPKGERGLPGVHGS |
| | PGDIGPQGIGIPGRTGAQGPAGEPGIQGPRGLPGLPGTPGTPGNDGVPGRDGKPGL |
| | PGPPGDPIALPLLGDIGALLKNFCGNCQASVPGLKSNKGEEGGAGEPGKYDSMARK |
| | GDIGPRGPPGIPGREGPKGSKGERGYPGIPGEKGDEGLQGIPGIPGAPGPTGPPGL |
| | MGRTGHPGPTGAKGEKGSDGPPGKPGPPGPPGIPFNERNGMSSLYKIKGGVNVPSY |
| | PGPPGPPGPKGDPGPVGEPGAMGLPGLEGFPGVKGDRGPAGPPGIAGMSGKPGAPG |
| | PPGVPGEPGERGPVGDIGFPGPEGPSGKPGINGKDGIPGAQGIMGKPGDRGPKGER |
| | GDQGIPGDRGSQGERGKPGLTGMKGAIGPMGPPGNKGSMGSPGHQGPPGSPGIPGI |
| | PADAVSFEEIKKYINQEVLRIFEERMAVFLSQLKLPAAMLAAQAYGRPGPPGKDGL |
| | PGPPGDPGPQGYRGQKGERGEPGIGLPGSPGLPGTSALGLPGSPGAPGPQGPPGPS |
| | GRCNPEDCLYPVSHAHQRTGGN (SEQ ID NO: 253; GenBankAccessionNo. |
| | NP_0018492) |
| Homo sapiens | MWNRYFVFYLLLLSAFTSQTVSGQRKKGPKSNLLARKSDVQGSICFIDIVFIVDSS |
| collagen type | ESSKIALFDKQKDFVDSLSDKIFQLTPGRSLEYDIKLAALQFSSSVQIDPPFSSWK |
| XXVIII, alpha | DLQTFKQKVKSMNLIGQGTFSYYAISNATRLLKREGRKDGVKVVLLMTDGIDHPKN |
| chain 1 | PDVQSISEDARISGISFITIALSTVVNEAKLRLISGDSSSEPTLLLSDPTLVDKIQ |
| (COL28A1), | DRLDILFEKKCERKICECEKGDPGDPGPPGTHGNPGIKGERGPKGNPGNAQKGEAG |
| precursor | ERGPGGIPGYKGDKGERGECGKPGIKGDKGSPGPYGPKGPRGIQGITGPPGDPGPK |
| | GFQGNKGEPGPPGPYGSPGAPGIGQQGIKGERGQEGRPGAPGPIGVGEPGQPGPRG |
| | PEGVPGERGLPGEGFPGPKGEKGSEGPTGPQGLQGLSIKGEKGDIGPVGPQGPMGI |
| | PGIGSQGEQGIQGPIGPPGPQGPAGQGLPGSKGEVGQMGPTGPRGPVGIGVQGPKG |
| | EPGSIGLPGQPGVPGEDGAAGKKGEAGLPGARGPEGPPGKGQPGPKGDEGKKGSKG |
| | NQGQRGLPGPEGPKGEPGIMGPFGMPGTSIPGPPGPKGDRGGPGIPGFKGEPGLSI |
| | RGPKGVQGPRGPVGAPGLKGDGYPGVPGPRGLPGPPGPMGLRGVGDTGAKGEPGVR |
| | GPPGPSGPRGVGTQGPKGDTGQKGLPGPPGPPGYGSQGIKGEQGPQGFPGPKGTMG |
| | HGLPGQKGEHGERGDVGKKGDKGEIGEPGSPGKQGLQGPKGDLGLTKEEIIKLITE |
| | ICGCGPKCKETPLELVFVIDSSESVGPENFQIIKNFVKTMADRVALDLATARIGII |
| | NYSHKVEKVANLKQFSSKDDFKLAVDNMQYLGEGTYTATALQAANDMFEDARPGVK |
| | KVALVITDGQTDSRDKEKLTEVVKNASDTNVEIFVIGVVKKNDPNFEIFHKEMNLI |
| | ATDPEHVYQFDDFFTLQDTLKQKLFQKICEDFDSYLVQIFGSSSPQPGFGMSGEEL |
| | SESTPEPQKEISESLSVTRDQDEDDKAPEPTWADDLPATTSSEATTTPRPLLSTPV |
| | DGAEDPRCLEALKPGNCGEYVVRWYYDKQVNSCARFWFSGCNGSGNRFNSEKECQE |
| | TCIQG (SEQ ID NO: 254; GenBank Accession No. NP_001032852.2) |

[0059] The compositions comprising a wound healing polypeptide(s) described herein and the methods of intradermal (e.g., using microneedles) or topical administration of the compositions described herein are useful in promoting and/or increasing wound healing in a subject in need thereof.

[0060] The compositions comprising a wound healing polypeptide(s) described herein and the methods of intradermal (e.g., using microneedles) or topical administration of the compositions described herein are also useful in preventing and/or reducing scar formation at a wound in a subject in need thereof.

[0061] The wound treated in accordance with a composition comprising a wound healing polypeptide(s) described herein and/or the methods of intradermal (e.g., using microneedles) or topical administration of the compositions described herein may be any type of wound. In certain embodiments, the wound is a wound healed by primary intention. In certain embodiments, the wound is an open wound. In certain embodiments, the wound is a wound healed by secondary intention. In certain embodiments, the wound is a closed wound. In certain embodiments, the wound is a wound healed by tertiary intention. In certain embodiments, the wound is an abrasive wound, a bed sore, a burn, a chronic wound, a diabetic ulcer (e.g., a diabetic foot ulcer), a diabetic wound, an injury, a graft wound, a pressure ulcer, a skin biopsy site, a surgical wound, a venous ulcer, or combinations thereof. In certain embodiments, the wound is an acute wound. In certain embodiments, the wound is a chronic wound. In certain embodiments, the wound is a diabetic ulcer (e.g., a diabetic foot ulcer). In certain embodiments, the wound is a venous ulcer. In certain embodiments, the wound is a pressure ulcer. In certain embodiments, the wound is abraded prior to intradermal (e.g., using microneedles) or topical administration of a composition described herein. In certain embodiments, the subject intradermally (e.g., using microneedles) or topically administered a composition described herein has diabetes.

[0062] The compositions comprising a wound healing polypeptide(s) described herein and the methods of intradermal (e.g., using microneedles) or topical administration of the compositions described herein are also useful in reducing the visibility of a scar in a subject in need thereof. In certain embodiments, the scar is a scar selected from the group consisting of an atrophic scar, a depressed scar, a fineline scar, a hyperpigmented scar, a hypopigmented scar, a hypertrophic scar, an ice-pick scar, a keloid scar, a scar contracture, a spread scar, a widespread scar, or any other type of scar. See, e.g., Bayat et al., 2003, BMJ 326:88-92 for nonlimiting examples of types of scars.

[0063] The compositions comprising a wound healing polypeptide(s) described herein and the methods of intradermal (e.g., using microneedles) or topical administration of the compositions described herein are also useful in treating epidermolysis bullosa. In certain embodiments, the wound healing polypeptide is a collagen (see, e.g., Table 1).

[0064] In certain aspects, the disclosure provides a polynucleotide (e.g., a RNA, e.g., a mRNA) comprising a nucleotide sequence (e.g., an open reading frame (ORF)) encoding a wound healing polypeptide. In some embodiments, the wound healing polypeptide of the invention is a wild type full length human growth factor protein (e.g., amphiregulin, CTGF, EGF, epigen, epiregulin, FGF2, FGF7, FGF10, HB-EGF, IGF1, IGF2, NRG-1, PLGF, a PDGF (e.g., PGDF-AA, PGDF-BB, or PGDF-AB), TGF-α, TGF-β, or VEGF-C) (see Table 1). In some embodiments, the wild type full length human growth factor wound healing polypeptide is a member of the EGF family of proteins (e.g., amphiregulin, EGF, epigen, epiregulin, HB-EGF, or NRG-1) (see Table 1). In some embodiments, the wild type full length human growth factor wound healing polypeptide is a member of the FGF family of proteins (e.g., FGF2, FGF7, or FGF10) (see Table 1). In some embodiments, the wild type full length human growth factor wound healing polypeptide is a member of the TGF family of proteins (e.g., TGF-α or TGF-β) (see Table 1). In some embodiments, the wild type full length human growth factor wound healing polypeptide is a member of the VEGF family of proteins (e.g., VEGF-C or PLGF) (see Table 1). In some embodiments, the wild type full length human growth factor wound healing polypeptide is a PDGF (e.g., PDGF-AA, PDGF-BB, or PDGF-AB) (see Table 1). In some embodiments, the wound healing polypeptide of the invention is a wild type full length human cytokine protein (e.g., G-CSF, GM-CSF, HGF, IL-1, IL-6, IL-8, IL-10, and TNF-α) (see Table 1). In some embodiments, the wild type full length human cytokine wound healing polypeptide is a member of the interleukin family of proteins (e.g., IL-1, IL-6, IL-8, or IL-10) (see Table 1). In some embodiments, the wound healing polypeptide of the invention is a wild type full length human chemokine protein (e.g., MCP-1 or SDF-1) (see Table 1). In some embodiments, the wound healing polypeptide of the invention is a wild type full length human protease inhibitor protein (e.g., SLPI) (see Table 1). In some embodiments, the wound healing polypeptide of the invention is a wild type full length human collagen protein (e.g., collagen type I, collagen type III, collagen type IV, collagen type V, collagen type VI, collagen type VII, collagen type VIII, collagen type XII, collagen type XIII, collagen type XIV, collagen type XVI, collagen type XVII, collagen type XVIII, collagen type XIX, or collagen type XXVIII) (see Table 1). In some embodiments, the wound healing polypeptide of the invention is a variant, a peptide or a polypeptide containing a substitution, and insertion and/or an addition, a deletion and/or a covalent modification with respect to the wild-type wound healing polypeptide sequence. In some embodiments, sequence tags or amino acids, can be added to the sequences encoded by the polynucleotides of the invention (e.g., at the N-terminal or C-terminal ends), e.g., for localization. In some embodiments, amino acid residues located at the carboxy, amino terminal, or internal regions of a polypeptide of the invention can optionally be deleted providing for fragments.

[0065] In some embodiments, the polynucleotide (e.g., a RNA, e.g., an mRNA) comprising a nucleotide sequence (e.g., an ORF) of the invention encodes a substitutional variant of a human wound healing polypeptide sequence, which can comprise one, two, three or more than three substitutions. In some embodiments, the substitutional variant can comprise one or more conservative amino acids substitutions. In other embodiments, the variant is an insertional variant. In other embodiments, the variant is a deletional variant.

[0066] Wound healing protein fragments, functional protein domains, variants, and homologous proteins (orthologs) are also within the scope of the wound healing polypeptides of the disclosure. Nonlimiting examples of wound healing polypeptides encoded by the polynucleotides of the invention are described in Table 1.

### 2. POLYNUCLEOTIDES AND OPEN READING FRAMES (ORFS)

[0067] The instant invention features mRNAs for use in: (i) promoting and/or improving wound healing, (ii) preventing and/or reducing scar formation at a wound, and (iii) reducing the visibility of a scar in a subject in need thereof. The mRNAs featured for use in the invention are administered to subjects and encode a human wound healing protein(s) in vivo. Accordingly, the invention relates to polynucleotides, e.g., mRNA, comprising an open reading frame of linked nucleosides encoding a human wound healing polypeptide (see, e.g., Table 1), isoforms thereof, functional fragments thereof, and fusion proteins comprising the wound healing polypeptide. In certain instances, the functional fragment thereof is a mature wound healing polypeptide lacking, e.g., a signal sequence. In particular, the invention provides sequence-optimized polynucleotides comprising nucleotides encoding the polypeptide sequence of a human wound healing polypeptide, or sequence having high sequence identity with those sequence optimized polynucleotides.

[0068] In certain aspects, the invention provides polynucleotides (e.g., a RNA such as an mRNA) that comprise a nucleotide sequence (e.g., an ORF) encoding one or more wound healing polypeptides. In some embodiments, the encoded wound healing polypeptide of the invention can be selected from:

[0069] (i) a full length wound healing polypeptide (e.g., having the same or essentially the same length as the wild-type wound healing peptide (e.g., see Table 1));

[0070] (ii) a mature, processed form of a wound healing polypeptide (e.g., a mature, processed form of a wound healing polypeptide depicted in Table 1);

[0071] (iii) a functional fragment of a wound healing polypeptide described herein (e.g., a truncated (e.g., deletion of carboxy, amino terminal, or internal regions) sequence shorter than the wound healing polypeptide, but still retaining the wound healing polypeptide's wound healing activity);

[0072] (iv) a variant thereof (e.g., full length or truncated wound healing proteins in which one or more amino acids have been replaced, e.g., variants that retain all or most of the wound healing activity of the polypeptide with respect to a reference protein (such as, e.g., any natural or artificial variants known in the art); or

[0073] (v) a fusion protein comprising (i) a full length wound healing protein (e.g., a protein described in Table 1), an isoform thereof, or a variant thereof, and (ii) a heterologous protein.

[0074] In certain embodiments, the encoded wound healing polypeptide is a mammalian growth factor wound healing polypeptide, such as a human growth factor wound healing polypeptide, a functional fragment or a variant thereof. Nonlimiting examples of growth factor wound healing polypeptides include

[0075] amphiregulin, CTGF, EGF, epigen, epiregulin, FGF2, FGF7, FGF10, HB-EGF, IGF1, IGF2, NRG-1, PLGF, a PDGF (e.g., PGDF-AA, PGDF-BB, or PGDF-AB), TGF-α, TGF-β, and VEGF-C (e.g., see Table 1). In some embodiments, the growth factor wound healing polypeptide is a member of the EGF family of proteins (e.g., amphiregulin, EGF, epigen, epiregulin, HB-EGF, or NRG-1). In certain embodiments, the growth factor wound healing polypeptide is a member of the FGF family of proteins (e.g., FGF2, FGF7, or FGF10). In certain embodiments, the growth factor wound healing polypeptide is a member of the TGF family of proteins (e.g., TGF-α or TGF-β). In certain embodiments, the growth factor wound healing polypeptide is a member of the VEGF family of proteins (e.g., VEGF-C or PLGF). In certain embodiments, the growth factor wound healing polypeptide is a PDGF (e.g., PDGF-AA, PDGF-BB, or PDGF-AB).

[0076] In certain embodiments, the encoded wound healing polypeptide is a mammalian cytokine wound healing polypeptide, such as a human cytokine wound healing polypeptide, a functional fragment or a variant thereof. Nonlimiting examples of cytokine wound healing polypeptides include G-CSF, GM-CSF, HGF, IL-1, IL-6, IL-8, IL-10, and TNF-α (e.g., see Table 1). In some embodiments, the cytokine wound healing polypeptide is an interleukin wound healing polypeptide (e.g., IL-1, IL-6, IL-8, or IL-10).

[0077] In certain embodiments, the encoded wound healing polypeptide is a mammalian chemokine wound healing polypeptide, such as a human chemokine wound healing polypeptide, a functional fragment or a variant thereof. Nonlimiting examples of chemokine wound healing polypeptides include MCP-1 and SDF-1 (e.g., see Table 1).

[0078] In certain embodiments, the encoded wound healing polypeptide is a mammalian protease inhibitor wound healing polypeptide, such as a human protease inhibitor wound healing polypeptide, a functional fragment or a variant thereof. A nonlimiting example of a protease inhibitor wound healing polypeptide is SLPI (e.g., see Table 1).

[0079] In certain embodiments, the encoded wound healing polypeptide is a mammalian collagen wound healing polypeptide, such as a human collagen wound healing polypeptide, a functional fragment or a variant thereof. Nonlimiting examples of a collagen wound healing polypeptides include collagen type I, collagen type III, collagen type IV, collagen type V, collagen type VI, collagen type VII, collagen type VIII, collagen type XII, collagen type XIII, collagen type XIV, collagen type XVI, collagen type XVII, collagen type XVIII, collagen type XIX, and collagen type XXVIII (e.g., see Table 1).

[0080] In some embodiments, the polynucleotide (e.g., a RNA, e.g., an mRNA) of the invention increases expression levels and/or detectable activity levels of the wound healing polypeptide in cells when introduced in those cells, e.g., by at least 10%, at least 15%, at least 20%, at least 25%, at least 30%, at least 35%, at least 40%, at least 45%, at least 50%, at least 55%, at least 60%, at least 65%, at least 70%, at least 75%, at least 80%, at least 85%, at least 90%, at least 95%, or at least 100%, compared to expression levels and/or detectable activity levels of the wound healing polypeptide in the cells prior to the intradermal (e.g., using microneedles) or topical administration of the polynucleotide of the invention. Wound healing protein expression levels and/or activity can be measured according to methods know in the art. In some embodiments, the polynucleotide is introduced to the cells in vitro. In some embodiments, the polynucleotide is introduced to the cells in vivo.

[0081] In some embodiments, the polynucleotides (e.g., a RNA, e.g., an mRNA) of the invention comprise a nucleotide sequence (e.g., an ORF) that encodes a wild-type human wound healing polypeptide (e.g., a polypeptide described in Table 1) or an isoform thereof.

[0082] The polynucleotide (e.g., a RNA, e.g., an mRNA) of the invention comprises a codon optimized nucleic acid sequence, wherein the open reading frame (ORF) of the codon optimized nucleic acid sequence is derived from a wild-type wound healing sequence (e.g., wild-type ORF encoding a wound healing polypeptide described in Table 1). For example, for polynucleotides of invention comprising a sequence optimized ORF encoding GM-CSF, the corresponding wild type sequence is the native human GM-CSF. Similarly, for a sequence optimized mRNA encoding a functional fragment of human GM-CSF, the corresponding wild type sequence is the corresponding fragment from human GM-CSF. As another example, for polynucleotides of invention comprising a sequence optimized ORF encoding PDGF, the corresponding wild type sequence is the native human PDGF. Similarly, for a sequence optimized mRNA encoding a functional fragment of human PDGF, the corresponding wild type sequence is the corresponding fragment from human PDGF. As yet another example, for polynucleotides of invention comprising a sequence optimized ORF encoding FGF2, the corresponding wild type sequence is the native human FGF2. Similarly, for a sequence optimized mRNA encoding a functional fragment of human FGF2, the corresponding wild type sequence is the corresponding fragment from human FGF2.

[0083] In some embodiments, the polynucleotides (e.g., a RNA, e.g., an mRNA) of the invention comprise a nucleotide sequence encoding a wound healing polypeptide having the full length sequence of a human wound healing polypeptide (e.g., a wound healing polypeptide described in Table 1).

[0084] In some embodiments, the polynucleotides (e.g., a RNA, e.g., an mRNA) of the invention comprise a nucleotide sequence (e.g., an ORF) encoding a mutant wound healing polypeptide. In some embodiments, the polynucleotides of the invention comprise an ORF encoding a wound healing polypeptide that comprises at least one point mutation in the wound healing polypeptide amino acid sequence and retains an activity of the wound healing polypeptide. In some embodiments, the mutant wound healing polypeptide has a wound healing activity which is at least 10%, at least 15%, at least 20%, at least 25%, at least 30%, at least 35%, at least 40%, at least 45%, at least 50%, at least 55%, at least 60%, at least 65%, at least 70%, at least 75%, at least 80%, at least 85%, at least 90%, at least 95%, or at least 100% of the wound healing activity of the corresponding wild-type wound healing. In some embodiments, the polynucleotide (e.g., a RNA, e.g., an mRNA) of the invention comprising an ORF encoding a mutant wound healing polypeptide is sequence optimized.

[0085] In some embodiments, the polynucleotide (e.g., a RNA, e.g., an mRNA) of the invention comprises a nucleotide sequence (e.g., an ORF) that encodes a wound healing polypeptide with mutations that do not alter the wound healing polypeptide's activity. Such mutant wound healing polypeptides can be referred to as function-neutral. In some embodiments, the polynucleotide comprises an ORF that encodes a mutant wound healing polypeptide comprising one or more function-neutral point mutations.

[0086] In some embodiments, the mutant wound healing polypeptide has higher wound healing activity than the corresponding wild-type wound healing polypeptide. In some embodiments, the mutant wound healing polypeptide has a wound healing activity that is at least 10%, at least 15%, at least 20%, at least 25%, at least 30%, at least 35%, at least 40%, at least 45%, at least 50%, at least 55%, at least 60%, at least 65%, at least 70%, at least 75%, at least 80%, at least 85%, at least 90%, at least 95%, or at least 100% higher than the activity of the corresponding wild-type wound healing polypeptide (i.e., the same wound healing polypeptide but without the mutation(s)).

[0087] In some embodiments, the polynucleotides (e.g., a RNA, e.g., an mRNA) of the invention comprise a nucleotide sequence (e.g., an ORF) encoding a functional wound healing polypeptide fragment, e.g., where one or more fragments correspond to a polypeptide subsequence of the wild type wound healing polypeptide and retain wound healing activity. In some embodiments, the wound healing polypeptide fragment has a wound healing activity which is at least 10%, at least 15%, at least 20%, at least 25%, at least 30%, at least 35%, at least 40%, at least 45%, at least 50%, at least 55%, at least 60%, at least 65%, at least 70%, at least 75%, at least 80%, at least 85%, at least 90%, at least 95%, or at least 100% of the wound healing activity of the corresponding full length wound healing polypeptide. In some embodiments, the polynucleotides (e.g., a RNA, e.g., an mRNA) of the invention comprising an ORF encoding a functional wound healing polypeptide fragment is sequence optimized.

[0088] In some embodiments, the polynucleotide (e.g., a RNA, e.g., an mRNA) of the invention comprises a nucleotide sequence (e.g., an ORF) encoding a wound healing polypeptide fragment that has higher wound healing activity than the corresponding full length wound healing polypeptide. Thus, in some embodiments the wound healing polypeptide fragment has a wound healing activity which is at least 10%, at least 15%, at least 20%, at least 25%, at least 30%, at least 35%, at least 40%, at least 45%, at least 50%, at least 55%, at least 60%, at least 65%, at least 70%, at least 75%, at least 80%, at least 85%, at least 90%, at least 95%, or at least 100% higher than the wound healing activity of the corresponding full length wound healing polypeptide.

[0089] In some embodiments, the polynucleotide (e.g., a RNA, e.g., an mRNA) of the invention comprises a nucleotide sequence (e.g., an ORF) encoding a wound healing polypeptide fragment that is at least 1%, 2%, 3%, 4%, 5%, 6%, 7%, 8%, 9%, 10%, 11%, 12%, 13%, 14%, 15%, 16%, 17%, 18%, 19%, 20%, 21%, 22%, 23%, 24% or 25% shorter than the wild-type wound healing polypeptide.

[0090] In some embodiments, the polynucleotide (e.g., a RNA, e.g., an mRNA) of the invention comprises from about 900 to about 100,000 nucleotides (e.g., from 900 to 1,000, from 900 to 1,100, from 900 to 1,200, from 900 to 1,300, from 900 to 1,400, from 900 to 1,500, from 1,000 to 1,100, from 1,000 to 1,100, from 1,000 to 1,200, from 1,000 to 1,300, from 1,000 to 1,400, from 1,000 to 1,500, from 1,187 to 1,200, from 1,187 to 1,400, from 1,187 to 1,600, from 1,187 to 1,800, from 1,187 to 2,000, from 1,187 to 3,000, from 1,187 to 5,000, from 1,187 to 7,000, from 1,187 to 10,000, from 1,187 to 25,000, from 1,187 to 50,000, from 1,187 to 70,000, or from 1,187 to 100,000).

[0091] In some embodiments, the polynucleotide of the invention (e.g., a RNA, e.g., an mRNA) comprises a nucleotide sequence (e.g., an ORF) encoding a wound healing polypeptide (e.g., the wild-type sequence, functional fragment, or variant thereof), wherein the length of the nucleotide sequence (e.g., an ORF) is at least 500 nucleotides in length (e.g., at least or greater than about 500, 600, 700, 80, 900, 1,000, 1,050, 1,100, 1,187, 1,200, 1,300, 1,400, 1,500, 1,600, 1,700, 1,800, 1,900, 2,000, 2,100, 2,200, 2,300, 2,400, 2,500, 2,600, 2,700, 2,800, 2,900, 3,000, 3,100, 3,200, 3,300, 3,400, 3,500, 3,600, 3,700, 3,800, 3,900, 4,000, 4,100, 4,200, 4,300, 4,400, 4,500, 4,600, 4,700, 4,800, 4,900, 5,000, 5,100, 5,200, 5,300, 5,400, 5,500, 5,600, 5,700, 5,800, 5,900, 6,000, 7,000, 8,000, 9,000, 10,000, 20,000, 30,000, 40,000, 50,000, 60,000, 70,000, 80,000, 90,000 or up to and including 100,000 nucleotides).

[0092] In some embodiments, the polynucleotide of the invention (e.g., a RNA, e.g., an mRNA) comprises a nucleotide sequence (e.g., an ORF) encoding a wound healing polypeptide (e.g., the wild-type sequence, functional fragment, or variant thereof) further comprises at least one nucleic acid sequence that is noncoding, e.g., a microRNA binding site. In some embodiments, the polynucleotide (e.g., a RNA, e.g., an mRNA) of the invention further comprises a 5′-UTR (e.g., selected from the sequences of SEQ ID NO:3, 88-102, and 165-167 or selected from the sequences of SEQ ID NO:3, SEQ ID NO:193, SEQ ID NO:39, and SEQ ID NO:194) and a 3′UTR (e.g., selected from the sequences of SEQ ID NO: 104-112, 150, 151, and 178 or selected from the sequences of SEQ ID NO:150, SEQ ID NO:175, SEQ ID NO:195, SEQ ID NO:196, SEQ ID NO:4, SEQ ID NO:177, SEQ ID NO:111, and SEQ ID NO:178). In a further embodiment, the polynucleotide (e.g., a RNA, e.g., an mRNA) comprises a 5′ terminal cap (e.g., Cap0, Cap1, ARCA, inosine, N1-methyl-guanosine, 2′-fluoro-guanosine, 7-deaza-guanosine, 8-oxo-guanosine, 2-amino-guanosine, LNA-guanosine, 2-azidoguanosine, Cap2, Cap4, 5′ methylG cap, or an analog thereof) and a poly-A-tail region (e.g., about 100 nucleotides in length). In a further embodiment, the polynucleotide (e.g., a RNA, e.g., an mRNA) comprises a 3′ UTR comprising a nucleic acid sequence selected from the group consisting of SEQ ID NO: 111, 112, 150, 151, and 178 or any combination thereof. In a further embodiment, the polynucleotide (e.g., a RNA, e.g., an mRNA) comprises a 3′ UTR comprising a nucleic acid sequence selected from the group consisting of SEQ ID NO:150, SEQ ID NO:175, SEQ ID NO:195, SEQ ID NO:196, SEQ ID NO:4, SEQ ID NO:177, SEQ ID NO:111, or SEQ ID NO:178 or any combination thereof. In some embodiments, the mRNA comprises a 3′ UTR comprising a nucleic acid sequence of SEQ ID NO:111. In some embodiments, the mRNA comprises a 3′ UTR comprising a nucleic acid sequence of SEQ ID NO:151. In some embodiments, the mRNA comprises a 3′ UTR comprising a nucleic acid sequence of SEQ ID NO:150. In some embodiments, the mRNA comprises a 3′ UTR comprising a nucleic acid sequence of SEQ ID NO:178. In some embodiments, the mRNA comprises a 3′ UTR comprising a nucleic acid sequence of SEQ ID NO:175. In some embodiments, the mRNA comprises a 3′ UTR comprising a nucleic acid sequence of SEQ ID NO:195. In some embodiments, the mRNA comprises a 3′ UTR comprising a nucleic acid sequence of SEQ ID NO:196. In some embodiments, the mRNA comprises a 3′ UTR comprising a nucleic acid sequence of SEQ ID NO:4. In some embodiments, the mRNA comprises a 3′ UTR comprising a nucleic acid sequence of SEQ ID NO:177. In some embodiments, the mRNA comprises a polyA tail. In some instances, the poly A tail is 50-150 (SEQ ID NO:265), 75-150 (SEQ ID NO:266), 85-150 (SEQ ID NO:267), 90-150 (SEQ ID NO:268), 90-120 (SEQ ID NO:269), 90-130 (SEQ ID NO:270), or 90-150 (SEQ ID NO:268) nucleotides in length. In some instances, the poly A tail is 100 nucleotides in length (SEQ ID NO:272).

[0093] In some embodiments, the polynucleotide of the invention (e.g., a RNA, e.g., an mRNA) comprises a nucleotide sequence (e.g., an ORF) encoding a wound healing polypeptide is single stranded or double stranded.

[0094] In some embodiments, the polynucleotide of the invention comprising a nucleotide sequence (e.g., an ORF) encoding a wound healing polypeptide (e.g., the wild-type sequence, functional fragment, or variant thereof) is DNA or RNA. In some embodiments, the polynucleotide of the invention is RNA. In some embodiments, the polynucleotide of the invention is, or functions as, an mRNA. In some embodiments, the mRNA comprises a nucleotide sequence (e.g., an ORF) that encodes at least one wound healing polypeptide, and is capable of being translated to produce the encoded wound healing polypeptide in vitro, in vivo, in situ or ex vivo.

[0095] In some embodiments, the polynucleotide of the invention (e.g., a RNA, e.g., an mRNA) comprises a sequence-optimized nucleotide sequence (e.g., an ORF) encoding a wound healing polypeptide (e.g., the wild-type sequence, functional fragment, or variant thereof, see e.g., the wound healing polypeptides of Table 1), wherein the polynucleotide comprises at least one chemically modified nucleobase, e.g., N1-methylpseudouracil or 5-methoxyuracil. In certain embodiments, all uracils in the polynucleotide are N1-methylpseudouracils. In other embodiments, all uracils in the polynucleotide are 5-methoxyuracils. In some embodiments, the polynucleotide further comprises a miRNA binding site, e.g., a miRNA binding site that binds to miR-142 and/or a miRNA binding site that binds to miR-126.

[0096] In some embodiments, the polynucleotide (e.g., a RNA, e.g., a mRNA) disclosed herein is formulated with a delivery agent comprising, e.g., a compound having the Formula (I), e.g., any of Compounds 1-232, e.g., Compound II; a compound having the Formula (III), (IV), (V), or (VI), e.g., any of Compounds 233-342, e.g., Compound VI; or a compound having the Formula (VIII), e.g., any of Compounds 419-428, e.g., Compound I, or any combination thereof. In some embodiments, the delivery agent comprises Compound II, DSPC, Cholesterol, and Compound I or PEG-DMG, e.g., with a mole ratio of about 50:10:38.5:1.5. In some embodiments, the delivery agent comprises Compound VI, DSPC, Cholesterol, and Compound I or PEG-DMG, e.g., with a mole ratio in the range of about 30 to about 60 mol % Compound II or VI (or related suitable amino lipid) (e.g., 30-40, 40-45, 45-50, 50-55 or 55-60 mol % Compound II or VI (or related suitable amino lipid)), about 5 to about 20 mol % phospholipid (or related suitable phospholipid or “helper lipid”) (e.g., 5-10, 10-15, or 15-20 mol % phospholipid (or related suitable phospholipid or “helper lipid”)), about 20 to about 50 mol % cholesterol (or related sterol or “non-cationic” lipid) (e.g., about 20-30, 30-35, 35-40, 40-45, or 45-50 mol % cholesterol (or related sterol or “non-cationic” lipid)) and about 0.05 to about 10 mol % PEG lipid (or other suitable PEG lipid) (e.g., 0.05-1, 1-2, 2-3, 3-4, 4-5, 5-7, or 7-10 mol % PEG lipid (or other suitable PEG lipid)). An exemplary delivery agent can comprise mole ratios of, for example, 47.5:10.5:39.0:3.0 or 50:10:38.5:1.5. In certain instances, an exemplary delivery agent can comprise mole ratios of, for example, 47.5:10.5:39.0:3; 47.5:10:39.5:3; 47.5:11:39.5:2; 47.5:10.5:39.5:2.5; 47.5:11:39:2.5; 48.5:10:38.5:3; 48.5:10.5:39:2; 48.5:10.5:38.5:2.5; 48.5:10.5:39.5:1.5; 48.5:10.5:38.0:3; 47:10.5:39.5:3; 47:10:40.5:2.5; 47:11:40:2; 47:10.5:39.5:3; 48:10.5:38.5:3; 48:10:39.5:2.5; 48:11:39:2; or 48:10.5:38.5:3. In some embodiments, the delivery agent comprises Compound II or VI, DSPC, Cholesterol, and Compound I or PEG-DMG, e.g., with a mole ratio of about 47.5:10.5:39.0:3.0. In some embodiments, the delivery agent comprises Compound II or VI, DSPC, Cholesterol, and Compound I or PEG-DMG, e.g., with a mole ratio of about 50:10:38.5:1.5.

[0097] In some embodiments, the polynucleotide of the disclosure is an mRNA that comprises a 5′-terminal cap (e.g., Cap 1), a 5′UTR (e.g., SEQ ID NO:3), the ORF sequence encodes a wound healing polypeptide (e.g., as described in Table 1), a 3′UTR (e.g., SEQ ID NO:111), and a poly A tail (e.g., about 100 nucleotides in length), wherein all uracils in the polynucleotide are N1-methylpseudouracils. In some embodiments, the delivery agent comprises Compound II or Compound VI as the ionizable lipid and PEG-DMG or Compound I as the PEG lipid.

### 3. SIGNAL SEQUENCES

[0098] The polynucleotides (e.g., a RNA, e.g., an mRNA) of the invention can also comprise nucleotide sequences that encode additional features that facilitate trafficking of the encoded polypeptides to therapeutically relevant sites. One such feature that aids in protein trafficking is the signal sequence, or targeting sequence. The peptides encoded by these signal sequences are known by a variety of names, including targeting peptides, transit peptides, and signal peptides. In some embodiments, the polynucleotide (e.g., a RNA, e.g., an mRNA) comprises a nucleotide sequence (e.g., an ORF) that encodes a signal peptide operably linked to a nucleotide sequence that encodes a wound healing polypeptide described herein.

[0099] In some embodiments, the “signal sequence” or “signal peptide” is a polynucleotide or polypeptide, respectively, which is from about 30-210, e.g., about 45-80 or 15-60 nucleotides (e.g., about 20, 30, 40, 50, 60, or 70 amino acids) in length that, optionally, is incorporated at the 5′ (or N-terminus) of the coding region or the polypeptide, respectively. Addition of these sequences results in trafficking the encoded polypeptide to a desired site, such as the endoplasmic reticulum or the mitochondria through one or more targeting pathways. Some signal peptides are cleaved from the protein, for example by a signal peptidase after the proteins are transported to the desired site.

[0100] In some embodiments, the polynucleotide of the invention comprises a nucleotide sequence encoding a wound healing polypeptide, wherein the nucleotide sequence further comprises a 5′ nucleic acid sequence encoding a heterologous signal peptide.

### 4. FUSION PROTEINS

[0101] In some embodiments, the polynucleotide of the invention (e.g., a RNA, e.g., an mRNA) can comprise more than one nucleic acid sequence (e.g., an ORF) encoding a polypeptide of interest. In some embodiments, polynucleotides of the invention comprise a single ORF encoding a wound healing polypeptide, a functional fragment, or a variant thereof. However, in some embodiments, the polynucleotide of the invention can comprise more than one ORF, for example, a first ORF encoding a wound healing polypeptide (a first polypeptide of interest), a functional fragment, or a variant thereof, and a second ORF expressing a second polypeptide of interest. In some embodiments, two or more polypeptides of interest can be genetically fused, i.e., two or more polypeptides can be encoded by the same ORF. In some embodiments, the polynucleotide can comprise a nucleic acid sequence encoding a linker (e.g., a G4S (SEQ ID NO:86) peptide linker or another linker known in the art) between two or more polypeptides of interest.

[0102] In some embodiments, a polynucleotide of the invention (e.g., a RNA, e.g., an mRNA) can comprise two, three, four, or more ORFs, each expressing a polypeptide of interest.

[0103] In some embodiments, the polynucleotide of the invention (e.g., a RNA, e.g., an mRNA) can comprise a first nucleic acid sequence (e.g., a first ORF) encoding a wound healing polypeptide and a second nucleic acid sequence (e.g., a second ORF) encoding a second polypeptide of interest (e.g., a second wound healing polypeptide).

### Linkers and Cleavable Peptides

[0104] In certain embodiments, the mRNAs of the disclosure encode more than one wound healing polypeptide domain or a heterologous domain, referred to herein as multimer constructs. In certain embodiments of the multimer constructs, the mRNA further encodes a linker located between each domain. The linker can be, for example, a cleavable linker or protease-sensitive linker. In certain embodiments, the linker is selected from the group consisting of F2A linker, P2A linker, T2A linker, E2A linker, and combinations thereof. This family of self-cleaving peptide linkers, referred to as 2A peptides, has been described in the art (see for example, Kim, J. H. et al. (2011) PLoS ONE 6:e18556). In certain embodiments, the linker is an F2A linker. In certain embodiments, the linker is a GGGS (SEQ ID NO:8) linker. In certain embodiments, the linker is a (GGGS)n (SEQ ID NO:190) linker, wherein n=2, 3, 4, or 5. In certain embodiments, the multimer construct contains three domains with intervening linkers, having the structure: domain-linker-domain-linker-domain e.g., wound healing polypeptide domain-linker-wound healing polypeptide domain-linker-wound healing polypeptide domain.

[0105] In one embodiment, the cleavable linker is an F2A linker (e.g., having the amino acid sequence GSGVKQTLNFDLLKLAGDVESNPGP (SEQ ID NO:186)). In other embodiments, the cleavable linker is a T2A linker (e.g., having the amino acid sequence GSGEGRGSLLTCGDVEENPGP (SEQ ID NO:187)), a P2A linker (e.g., having the amino acid sequence GSGATNFSLLKQAGDVEENPGP (SEQ ID NO:188)) or an E2A linker (e.g., having the amino acid sequence GSGQCTNYALLKLAGDVESNPGP (SEQ ID NO:189)). The skilled artisan will appreciate that other art-recognized linkers may be suitable for use in the constructs of the invention (e.g., encoded by the polynucleotides of the invention). The skilled artisan will likewise appreciate that other multicistronic constructs may be suitable for use in the invention. In exemplary embodiments, the construct design yields approximately equimolar amounts of intrabody and/or domain thereof encoded by the constructs of the invention.

[0106] In one embodiment, the self-cleaving peptide may be, but is not limited to, a 2A peptide. A variety of 2A peptides are known and available in the art and may be used, including e.g., the foot and mouth disease virus (FMDV) 2A peptide, the equine rhinitis A virus 2A peptide, the Thosea asigna virus 2A peptide, and the porcine teschovirus-1 2A peptide. 2A peptides are used by several viruses to generate two proteins from one transcript by ribosome-skipping, such that a normal peptide bond is impaired at the 2A peptide sequence, resulting in two discontinuous proteins being produced from one translation event. As a non-limiting example, the 2A peptide may have the protein sequence of SEQ ID NO:188, fragments or variants thereof. In one embodiment, the 2A peptide cleaves between the last glycine and last proline. As another non-limiting example, the polynucleotides of the present invention may include a polynucleotide sequence encoding the 2A peptide having the protein sequence of fragments or variants of SEQ ID NO:188. One example of a polynucleotide sequence encoding the 2A peptide is: GGAAGCGGAGCUACUAACUUCAGCCUGCUGAAGCAGGCUGGAGACGU GGAGGAGAACCCUGGACCU (SEQ ID NO:191). In one illustrative embodiment, a 2A peptide is encoded by the following sequence: 5′-UCCGGACUCAGAUCCGGGGAUCUCAAAAUUGUCGCUCCUGUCAAACAA ACUCUUAACUUUGAUUUACUCAAACUGGCTGGGGAUGUAGAAAGCAAU CCAGGTCCACUC-3′ (SEQ ID NO:192). The polynucleotide sequence of the 2A peptide may be modified or codon optimized by the methods described herein and/or are known in the art.

[0107] In one embodiment, this sequence may be used to separate the coding regions of two or more polypeptides of interest. As a non-limiting example, the sequence encoding the F2A peptide may be between a first coding region A and a second coding region B (A-F2Apep-B). The presence of the F2A peptide results in the cleavage of the one long protein between the glycine and the proline at the end of the F2A peptide sequence (NPGP (SEQ ID NO:256) is cleaved to result in NPG and P) thus creating separate protein A (with 21 amino acids of the F2A peptide attached, ending with NPG) and separate protein B (with 1 amino acid, P, of the F2A peptide attached). Likewise, for other 2A peptides (P2A, T2A and E2A), the presence of the peptide in a long protein results in cleavage between the glycine and proline at the end of the 2A peptide sequence (NPGP (SEQ ID NO:256) is cleaved to result in NPG and P). Protein A and protein B may be the same or different peptides or polypeptides of interest.

### 5. SEQUENCE OPTIMIZATION OF NUCLEOTIDE SEQUENCE ENCODING WOUND HEALING POLYPEPTIDE

[0108] In some embodiments, the polynucleotide (e.g., a RNA, e.g., an mRNA) of the invention is sequence optimized. In some embodiments, the polynucleotide (e.g., a RNA, e.g., an mRNA) of the invention comprises a nucleotide sequence (e.g., an ORF) encoding a wound healing polypeptide, optionally, a nucleotide sequence (e.g., an ORF) encoding another polypeptide of interest, a 5′-UTR, a 3′-UTR, the 5′ UTR or 3′ UTR optionally comprising at least one microRNA binding site, optionally a nucleotide sequence encoding a linker, a polyA tail, or any combination thereof), in which the ORF(s) are sequence optimized.

[0109] A sequence-optimized nucleotide sequence, e.g., a codon-optimized mRNA sequence encoding a wound healing polypeptide, is a sequence comprising at least one synonymous nucleobase substitution with respect to a reference sequence (e.g., a wild type nucleotide sequence encoding a wound healing polypeptide).

[0110] A sequence-optimized nucleotide sequence can be partially or completely different in sequence from the reference sequence. For example, a reference sequence encoding polyserine uniformly encoded by UCU codons can be sequence-optimized by having 100% of its nucleobases substituted (for each codon, U in position 1 replaced by A, C in position 2 replaced by G, and U in position 3 replaced by C) to yield a sequence encoding polyserine which would be uniformly encoded by AGC codons. The percentage of sequence identity obtained from a global pairwise alignment between the reference polyserine nucleic acid sequence and the sequence-optimized polyserine nucleic acid sequence would be 0%. However, the protein products from both sequences would be 100% identical.

[0111] Some sequence optimization (also sometimes referred to codon optimization) methods are known in the art (and discussed in more detail below) and can be useful to achieve one or more desired results. These results can include, e.g., matching codon frequencies in certain tissue targets and/or host organisms to ensure proper folding; biasing G/C content to increase mRNA stability or reduce secondary structures; minimizing tandem repeat codons or base runs that can impair gene construction or expression; customizing transcriptional and translational control regions; inserting or removing protein trafficking sequences; removing/adding post translation modification sites in an encoded protein (e.g., glycosylation sites); adding, removing or shuffling protein domains; inserting or deleting restriction sites; modifying ribosome binding sites and mRNA degradation sites; adjusting translational rates to allow the various domains of the protein to fold properly; and/or reducing or eliminating problem secondary structures within the polynucleotide. Sequence optimization tools, algorithms and services are known in the art, non-limiting examples include services from GeneArt (Life Technologies), DNA2.0 (Menlo Park Calif.) and/or proprietary methods.

[0112] Codon options for each amino acid are given in TABLE 2.

TABLE 2
Codon Options

| | Single | |
|---|---|---|
| | Letter | |
| Amino Acid | Code | Codon Options |
| Isoleucine | I | AUU, AUC, AUA |
| Leucine | L | CUU, CUC, CUA, CUG, UUA, UUG |
| Valine | V | GUU, GUC, GUA, GUG |
| Phenylalanine | F | UUU, UUC |
| Methionine | M | AUG |
| Cysteine | C | UGU, UGC |
| Alanine | A | GCU, GCC, GCA, GCG |
| Glycine | G | GGU, GGC, GGA, GGG |
| Proline | P | CCU, CCC, CCA, CCG |
| Threonine | T | ACU, ACC, ACA, ACG |
| Serine | S | UCU, UCC, UCA, UCG, AGU, AGC |
| Tyrosine | Y | UAU, UAC |
| Tryptophan | W | UGG |
| Glutamine | Q | CAA, CAG |
| Asparagine | N | AAU, AAC |
| Histidine | H | CAU, CAC |
| Glutamic acid | E | GAA, GAG |
| Aspartic acid | D | GAU, GAC |
| Lysine | K | AAA, AAG |
| Arginine | R | CGU, CGC, CGA, CGG, AGA, AGG |
| Selenocysteine | Sec | UGA in mRNA in presence of |
| | | Selenocysteine insertion |
| | | element (SECTS) |
| Stop codons | Stop | UAA, UAG, UGA |

[0113] In some embodiments, a polynucleotide (e.g., a RNA, e.g., an mRNA) of the invention comprises a sequence-optimized nucleotide sequence (e.g., an ORF) encoding a wound healing polypeptide, a functional fragment, or a variant thereof, wherein the wound healing polypeptide, functional fragment, or a variant thereof encoded by the sequence-optimized nucleotide sequence has improved properties (e.g., compared to a wound healing polypeptide, functional fragment, or a variant thereof encoded by a reference nucleotide sequence that is not sequence optimized), e.g., improved properties related to expression efficacy after intradermal (e.g., using microneedles) or topical administration in vivo. Such properties include, but are not limited to, improving nucleic acid stability (e.g., mRNA stability), increasing translation efficacy in the target tissue, reducing the number of truncated proteins expressed, improving the folding or prevent misfolding of the expressed proteins, reducing toxicity of the expressed products, reducing cell death caused by the expressed products, increasing and/or decreasing protein aggregation.

[0114] In some embodiments, the sequence-optimized nucleotide sequence (e.g., an ORF) is codon optimized for expression in human subjects, having structural and/or chemical features that avoid one or more of the problems in the art, for example, features which are useful for optimizing formulation and delivery of nucleic acid-based therapeutics while retaining structural and functional integrity; overcoming a threshold of expression; improving expression rates; half-life and/or protein concentrations; optimizing protein localization; and avoiding deleterious bio-responses such as the immune response and/or degradation pathways.

[0115] In some embodiments, the polynucleotides of the invention comprise a nucleotide sequence (e.g., a nucleotide sequence (e.g., an ORF) encoding a wound healing polypeptide, a nucleotide sequence (e.g., an ORF) encoding another polypeptide of interest, a 5′-UTR, a 3′-UTR, a microRNA binding site, a nucleic acid sequence encoding a linker, or any combination thereof) that is sequence-optimized according to a method comprising:

[0116] (i) substituting at least one codon in a reference nucleotide sequence (e.g., an ORF encoding a wound healing polypeptide) with an alternative codon to increase or decrease uridine content to generate a uridine-modified sequence;

[0117] (ii) substituting at least one codon in a reference nucleotide sequence (e.g., an ORF encoding a wound healing polypeptide) with an alternative codon having a higher codon frequency in the synonymous codon set;

[0118] (iii) substituting at least one codon in a reference nucleotide sequence (e.g., an ORF encoding a wound healing polypeptide) with an alternative codon to increase G/C content; or

[0119] (iv) a combination thereof.

[0120] In some embodiments, the sequence-optimized nucleotide sequence (e.g., an ORF encoding a wound healing polypeptide) has at least one improved property with respect to the reference nucleotide sequence.

[0121] In some embodiments, the sequence optimization method is multiparametric and comprises one, two, three, four, or more methods disclosed herein and/or other optimization methods known in the art.

[0122] Features, which can be considered beneficial in some embodiments of the invention, can be encoded by or within regions of the polynucleotide and such regions can be upstream (5′) to, downstream (3′) to, or within the region that encodes the wound healing polypeptide. These regions can be incorporated into the polynucleotide before and/or after sequence-optimization of the protein encoding region or open reading frame (ORF). Examples of such features include, but are not limited to, untranslated regions (UTRs), microRNA sequences, Kozak sequences, oligo(dT) sequences, poly-A tail, and detectable tags and can include multiple cloning sites that can have XbaI recognition.

[0123] In some embodiments, the polynucleotide of the invention comprises a 5′ UTR, a 3′ UTR and/or a microRNA binding site. In some embodiments, the polynucleotide comprises two or more 5′ UTRs and/or 3′ UTRs, which can be the same or different sequences. In some embodiments, the polynucleotide comprises two or more microRNA binding sites, which can be the same or different sequences. Any portion of the 5′ UTR, 3′ UTR, and/or microRNA binding site, including none, can be sequence-optimized and can independently contain one or more different structural or chemical modifications, before and/or after sequence optimization.

[0124] In some embodiments, after optimization, the polynucleotide is reconstituted and transformed into a vector such as, but not limited to, plasmids, viruses, cosmids, and artificial chromosomes. For example, the optimized polynucleotide can be reconstituted and transformed into chemically competent E. coli, yeast, Neurospora, maize, Drosophila, etc. where high copy plasmid-like or chromosome structures occur by methods described herein.

### 6. SEQUENCE-OPTIMIZED NUCLEOTIDE SEQUENCES ENCODING WOUND HEALING POLYPEPTIDES

[0125] In some embodiments, the polynucleotide of the invention comprises a sequence-optimized nucleotide sequence encoding a wound healing polypeptide disclosed herein. In some embodiments, the polynucleotide of the invention comprises an open reading frame (ORF) encoding a wound healing polypeptide, wherein the ORF has been sequence optimized. In some embodiments, the sequence optimized wound healing sequences, fragments, and variants thereof are used to practice the methods disclosed herein.

[0126] In some embodiments, a polynucleotide of the present disclosure, for example a polynucleotide comprising an mRNA nucleotide sequence encoding a wound healing polypeptide, comprises from 5′ to 3′ end:

[0127] (i) a 5′ cap provided herein, for example, Cap1;

[0128] (ii) a 5′ UTR, such as the sequences provided herein, for example, SEQ ID NO:3;

[0129] (iii) an open reading frame encoding a wound healing polypeptide, e.g., a sequence optimized nucleic acid sequence encoding a wound healing polypeptide described in Table 1;

[0130] (iv) at least one stop codon (if not present at 5′ terminus of 3′UTR);

[0131] (v) a 3′ UTR, such as the sequences provided herein, for example, SEQ ID NO:111; and

[0132] (vi) a poly-A tail provided above.

[0133] In certain embodiments, all uracils in the polynucleotide are N1-methylpseudouracil (G5). In certain embodiments, all uracils in the polynucleotide are 5-methoxyuracil (G6).

[0134] The sequence-optimized nucleotide sequences disclosed herein are distinct from the corresponding wild type nucleotide acid sequences and from other known sequence-optimized nucleotide sequences, e.g., these sequence-optimized nucleic acids have unique compositional characteristics.

[0135] In some embodiments, the percentage of uracil or thymine nucleobases in a sequence-optimized nucleotide sequence (e.g., encoding a wound healing polypeptide, a functional fragment, or a variant thereof) is modified (e.g., reduced) with respect to the percentage of uracil or thymine nucleobases in the reference wild-type nucleotide sequence. Such a sequence is referred to as a uracil-modified or thymine-modified sequence. The percentage of uracil or thymine content in a nucleotide sequence can be determined by dividing the number of uracils or thymines in a sequence by the total number of nucleotides and multiplying by 100. In some embodiments, the sequence-optimized nucleotide sequence has a lower uracil or thymine content than the uracil or thymine content in the reference wild-type sequence. In some embodiments, the uracil or thymine content in a sequence-optimized nucleotide sequence of the invention is greater than the uracil or thymine content in the reference wild-type sequence and still maintain beneficial effects, e.g., increased expression and/or reduced Toll-Like Receptor (TLR) response when compared to the reference wild-type sequence.

[0136] Methods for optimizing codon usage are known in the art. For example, an ORF of any one or more of the sequences provided herein may be codon optimized. Codon optimization, in some embodiments, may be used to match codon frequencies in target and host organisms to ensure proper folding; bias GC content to increase mRNA stability or reduce secondary structures; minimize tandem repeat codons or base runs that may impair gene construction or expression; customize transcriptional and translational control regions; insert or remove protein trafficking sequences; remove/add post translation modification sites in encoded protein (e.g., glycosylation sites); add, remove or shuffle protein domains; insert or delete restriction sites; modify ribosome binding sites and mRNA degradation sites; adjust translational rates to allow the various domains of the protein to fold properly; or reduce or eliminate problem secondary structures within the polynucleotide. Codon optimization tools, algorithms and services are known in the art—non-limiting examples include services from GeneArt (Life Technologies), DNA2.0 (Menlo Park Calif.) and/or proprietary methods. In some embodiments, the open reading frame (ORF) sequence is optimized using optimization algorithms.

### 7. CHARACTERIZATION OF SEQUENCE OPTIMIZED NUCLEIC ACIDS

[0137] In some embodiments of the invention, the polynucleotide (e.g., a RNA, e.g., an mRNA) comprising a sequence optimized nucleic acid disclosed herein encoding a wound healing polypeptide can be tested to determine whether at least one nucleic acid sequence property (e.g., stability when exposed to nucleases) or expression property has been improved with respect to the non-sequence optimized nucleic acid.

[0138] As used herein, “expression property” refers to a property of a nucleic acid sequence either in vivo (e.g., translation efficacy of a synthetic mRNA after intradermal (e.g., using microneedles) or topical administration to a subject in need thereof) or in vitro (e.g., translation efficacy of a synthetic mRNA tested in an in vitro model system). Expression properties include but are not limited to the amount of protein produced by an mRNA encoding a wound healing polypeptide after intradermal (e.g., using microneedles) or topical administration, and the amount of soluble or otherwise functional protein produced. In some embodiments, sequence optimized nucleic acids disclosed herein can be evaluated according to the viability of the cells expressing a protein encoded by a sequence optimized nucleic acid sequence (e.g., a RNA, e.g., an mRNA) encoding a wound healing polypeptide disclosed herein.

[0139] In a particular embodiment, a plurality of sequence optimized nucleic acids disclosed herein (e.g., a RNA, e.g., an mRNA) containing codon substitutions with respect to the non-optimized reference nucleic acid sequence can be characterized functionally to measure a property of interest, for example an expression property in an in vitro model system, or in vivo in a target tissue or cell.

[0140] a. Optimization of Nucleic Acid Sequence Intrinsic Properties

[0141] In some embodiments of the invention, the desired property of the polynucleotide is an intrinsic property of the nucleic acid sequence. For example, the nucleotide sequence (e.g., a RNA, e.g., an mRNA) can be sequence optimized for in vivo or in vitro stability. In some embodiments, the nucleotide sequence can be sequence optimized for expression in a particular target tissue or cell. In some embodiments, the nucleic acid sequence is sequence optimized to increase its plasma half-life by preventing its degradation by endo and exonucleases.

[0142] In other embodiments, the nucleic acid sequence is sequence optimized to increase its resistance to hydrolysis in solution, for example, to lengthen the time that the sequence optimized nucleic acid or a pharmaceutical composition comprising the sequence optimized nucleic acid can be stored under aqueous conditions with minimal degradation.

[0143] In other embodiments, the sequence optimized nucleic acid can be optimized to increase its resistance to hydrolysis in dry storage conditions, for example, to lengthen the time that the sequence optimized nucleic acid can be stored after lyophilization with minimal degradation.

[0144] b. Nucleic Acids Sequence Optimized for Protein Expression

[0145] In some embodiments of the invention, the desired property of the polynucleotide is the level of expression of a wound healing polypeptide encoded by a sequence optimized sequence disclosed herein. Protein expression levels can be measured using one or more expression systems. In some embodiments, expression can be measured in cell culture systems, e.g., CHO cells or HEK293 cells. In some embodiments, expression can be measured using in vitro expression systems prepared from extracts of living cells, e.g., rabbit reticulocyte lysates, or in vitro expression systems prepared by assembly of purified individual components. In other embodiments, the protein expression is measured in an in vivo system, e.g., mouse, rabbit, monkey, etc.

[0146] In some embodiments, protein expression in solution form can be desirable. Accordingly, in some embodiments, a reference sequence can be sequence optimized to yield a sequence optimized nucleic acid sequence having optimized levels of expressed proteins in soluble form. Levels of protein expression and other properties such as solubility, levels of aggregation, and the presence of truncation products (i.e., fragments due to proteolysis, hydrolysis, or defective translation) can be measured according to methods known in the art, for example, using electrophoresis (e.g., native or SDS-PAGE) or chromatographic methods (e.g., HPLC, size exclusion chromatography, etc.).

[0147] c. Optimization of Target Tissue or Target Cell Viability

[0148] In some embodiments, the expression of heterologous therapeutic proteins encoded by a nucleic acid sequence can have deleterious effects in the target tissue or cell, reducing protein yield, or reducing the quality of the expressed product (e.g., due to the presence of protein fragments or precipitation of the expressed protein in inclusion bodies), or causing toxicity.

[0149] Accordingly, in some embodiments of the invention, the sequence optimization of a nucleic acid sequence disclosed herein, e.g., a nucleic acid sequence encoding a wound healing polypeptide, can be used to increase the viability of target cells expressing the protein encoded by the sequence optimized nucleic acid.

[0150] Heterologous protein expression can also be deleterious to cells transfected with a nucleic acid sequence for autologous or heterologous transplantation. Accordingly, in some embodiments of the present disclosure the sequence optimization of a nucleic acid sequence disclosed herein can be used to increase the viability of target cells expressing the protein encoded by the sequence optimized nucleic acid sequence. Changes in cell or tissue viability, toxicity, and other physiological reaction can be measured according to methods known in the art.

[0151] d. Reduction of Immune and/or Inflammatory Response

[0152] In some cases, the administration of a sequence optimized nucleic acid encoding a wound healing polypeptide or a functional fragment thereof can trigger an immune response, which could be caused by (i) the therapeutic agent (e.g., an mRNA encoding a wound healing polypeptide), or (ii) the expression product of such therapeutic agent (e.g., the wound healing polypeptide encoded by the mRNA), or (iv) a combination thereof. Accordingly, in some embodiments of the present disclosure the sequence optimization of nucleic acid sequence (e.g., an mRNA) disclosed herein can be used to decrease an immune or inflammatory response triggered by the administration of a nucleic acid encoding a wound healing polypeptide or by the expression product of the wound healing polypeptide encoded by such nucleic acid.

[0153] In some aspects, an inflammatory response can be measured by detecting increased levels of one or more inflammatory cytokines using methods known in the art, e.g., ELISA. The term “inflammatory cytokine” refers to cytokines that are elevated in an inflammatory response. Examples of inflammatory cytokines include interleukin-6 (IL-6), CXCL1 (chemokine (C—X—C motif) ligand 1; also known as GROα, interferon-γ (IFNγ), tumor necrosis factor α (TNFα), interferon γ-induced protein 10 (IP-10), or granulocyte-colony stimulating factor (G-CSF). The term inflammatory cytokines includes also other cytokines associated with inflammatory responses known in the art, e.g., interleukin-1 (IL-1), interleukin-8 (IL-8), interleukin-12 (IL-12), interleukin-13 (Il-13), interferon α (IFN-α), etc.

### 8. MODIFIED NUCLEOTIDE SEQUENCES ENCODING WOUND HEALING POLYPEPTIDES

[0154] In some embodiments, the polynucleotide (e.g., a RNA, e.g., an mRNA) of the invention comprises a chemically modified nucleobase, for example, a chemically modified uracil, e.g., pseudouracil, N1-methylpseudouracil, 5-methoxyuracil, or the like. In some embodiments, the mRNA is a uracil-modified sequence comprising an ORF encoding a wound healing polypeptide, wherein the mRNA comprises a chemically modified nucleobase, for example, a chemically modified uracil, e.g., pseudouracil, N1-methylpseudouracil, or 5-methoxyuracil.

[0155] In certain aspects of the invention, when the modified uracil base is connected to a ribose sugar, as it is in polynucleotides, the resulting modified nucleoside or nucleotide is referred to as modified uridine. In some embodiments, uracil in the polynucleotide is at least about 25%, at least about 30%, at least about 40%, at least about 50%, at least about 60%, at least about 70%, at least about 80%, at least 90%, at least 95%, at least 99%, or about 100% modified uracil. In one embodiment, uracil in the polynucleotide is at least 95% modified uracil. In another embodiment, uracil in the polynucleotide is 100% modified uracil.

[0156] In embodiments where uracil in the polynucleotide is at least 95% modified uracil overall uracil content can be adjusted such that an mRNA provides suitable protein expression levels while inducing little to no immune response. In some embodiments, the uracil content of the ORF is between about 100% and about 150%, between about 100% and about 110%, between about 105% and about 115%, between about 110% and about 120%, between about 115% and about 125%, between about 120% and about 130%, between about 125% and about 135%, between about 130% and about 140%, between about 135% and about 145%, between about 140% and about 150% of the theoretical minimum uracil content in the corresponding wild-type ORF (% U_{TM}). In other embodiments, the uracil content of the ORF is between about 121% and about 136% or between 123% and 134% of the % U_{TM}. In some embodiments, the uracil content of the ORF encoding a wound healing polypeptide is about 115%, about 120%, about 125%, about 130%, about 135%, about 140%, about 145%, or about 150% of the % U_{TM}. In this context, the term “uracil” can refer to modified uracil and/or naturally occurring uracil.

[0157] In some embodiments, the uracil content in the ORF of the mRNA encoding a wound healing polypeptide of the invention is less than about 30%, about 25%, about 20%, about 15%, or about 10% of the total nucleobase content in the ORF. In some embodiments, the uracil content in the ORF is between about 10% and about 20% of the total nucleobase content in the ORF. In other embodiments, the uracil content in the ORF is between about 10% and about 25% of the total nucleobase content in the ORF. In one embodiment, the uracil content in the ORF of the mRNA encoding a wound healing polypeptide is less than about 20% of the total nucleobase content in the open reading frame. In this context, the term “uracil” can refer to modified uracil and/or naturally occurring uracil.

[0158] In further embodiments, the ORF of the mRNA encoding a wound healing polypeptide having modified uracil and adjusted uracil content has increased Cytosine (C), Guanine (G), or Guanine/Cytosine (G/C) content (absolute or relative). In some embodiments, the overall increase in C, G, or G/C content (absolute or relative) of the ORF is at least about 2%, at least about 3%, at least about 4%, at least about 5%, at least about 6%, at least about 7%, at least about 10%, at least about 15%, at least about 20%, at least about 40%, at least about 50%, at least about 60%, at least about 70%, at least about 80%, at least about 90%, at least about 95%, or at least about 100% relative to the G/C content (absolute or relative) of the wild-type ORF. In some embodiments, the G, the C, or the G/C content in the ORF is less than about 100%, less than about 90%, less than about 85%, or less than about 80% of the theoretical maximum G, C, or G/C content of the corresponding wild type nucleotide sequence encoding the wound healing polypeptide (% G_{TMX}; % C_{TMX}, or % G/C_{TMX}). In some embodiments, the increases in G and/or C content (absolute or relative) described herein can be conducted by replacing synonymous codons with low G, C, or G/C content with synonymous codons having higher G, C, or G/C content. In other embodiments, the increase in G and/or C content (absolute or relative) is conducted by replacing a codon ending with U with a synonymous codon ending with G or C.

[0159] In further embodiments, the ORF of the mRNA encoding a wound healing polypeptide of the invention comprises modified uracil and has an adjusted uracil content containing less uracil pairs (UU) and/or uracil triplets (UUU) and/or uracil quadruplets (UUUU) than the corresponding wild-type nucleotide sequence encoding the wound healing polypeptide. In some embodiments, the ORF of the mRNA encoding a wound healing polypeptide of the invention contains no uracil pairs and/or uracil triplets and/or uracil quadruplets. In some embodiments, uracil pairs and/or uracil triplets and/or uracil quadruplets are reduced below a certain threshold, e.g., no more than 1, 2, 3, 4, 5, 6, 7, 8, 9, 10, 11, 12, 13, 14, 15, 16, 17, 18, 19, or 20 occurrences in the ORF of the mRNA encoding the wound healing polypeptide. In a particular embodiment, the ORF of the mRNA encoding the wound healing polypeptide of the invention contains less than 20, 19, 18, 17, 16, 15, 14, 13, 12, 11, 10, 9, 8, 7, 6, 5, 4, 3, 2, or 1 non-phenylalanine uracil pairs and/or triplets. In another embodiment, the ORF of the mRNA encoding the wound healing polypeptide contains no non-phenylalanine uracil pairs and/or triplets.

[0160] In further embodiments, the ORF of the mRNA encoding a wound healing polypeptide of the invention comprises modified uracil and has an adjusted uracil content containing less uracil-rich clusters than the corresponding wild-type nucleotide sequence encoding the wound healing polypeptide. In some embodiments, the ORF of the mRNA encoding the wound healing polypeptide of the invention contains uracil-rich clusters that are shorter in length than corresponding uracil-rich clusters in the corresponding wild-type nucleotide sequence encoding the wound healing polypeptide.

[0161] In further embodiments, alternative lower frequency codons are employed. At least about 5%, at least about 10%, at least about 15%, at least about 20%, at least about 25%, at least about 30%, at least about 35%, at least about 40%, at least about 45%, at least about 50%, at least about 55%, at least about 60%, at least about 65%, at least about 70%, at least about 75%, at least about 80%, at least about 85%, at least about 90%, at least about 95%, at least about 99%, or 100% of the codons in the wound healing polypeptide-encoding ORF of the modified uracil-comprising mRNA are substituted with alternative codons, each alternative codon having a codon frequency lower than the codon frequency of the substituted codon in the synonymous codon set. The ORF also has adjusted uracil content, as described above. In some embodiments, at least one codon in the ORF of the mRNA encoding the wound healing polypeptide is substituted with an alternative codon having a codon frequency lower than the codon frequency of the substituted codon in the synonymous codon set.

[0162] In some embodiments, the adjusted uracil content, wound healing polypeptide-encoding ORF of the modified uracil-comprising mRNA exhibits expression levels of the wound healing polypeptide when administered to a mammalian cell that are higher than expression levels of the wound healing polypeptide from the corresponding wild-type mRNA. In some embodiments, the mammalian cell is a mouse cell, a rat cell, or a rabbit cell. In other embodiments, the mammalian cell is a monkey cell or a human cell. In some embodiments, the human cell is a HeLa cell, a BJ fibroblast cell, or a peripheral blood mononuclear cell (PBMC). In some embodiments, the wound healing polypeptide is expressed at a level higher than expression levels of the wound healing polypeptide from the corresponding wild-type mRNA when the mRNA is administered to a mammalian cell in vivo. In some embodiments, the mRNA is administered to mice, rabbits, rats, monkeys, or humans. In one embodiment, mice are null mice. In some embodiments, the mRNA is administered to mice in an amount of about 0.01 mg/kg, about 0.05 mg/kg, about 0.1 mg/kg, or 0.2 mg/kg or about 0.5 mg/kg. In other embodiments, the wound healing polypeptide is expressed when the mRNA is administered to a mammalian cell in vitro. In some embodiments, the expression is increased by at least about 2-fold, at least about 5-fold, at least about 10-fold, at least about 50-fold, at least about 500-fold, at least about 1500-fold, or at least about 3000-fold. In other embodiments, the expression is increased by at least about 10%, about 20%, about 30%, about 40%, about 50%, 60%, about 70%, about 80%, about 90%, or about 100%.

[0163] In some embodiments, adjusted uracil content, wound healing polypeptide-encoding ORF of the modified uracil-comprising mRNA exhibits increased stability. In some embodiments, the mRNA exhibits increased stability in a cell relative to the stability of a corresponding wild-type mRNA under the same conditions. In some embodiments, the mRNA exhibits increased stability including resistance to nucleases, thermal stability, and/or increased stabilization of secondary structure. In some embodiments, increased stability exhibited by the mRNA is measured by determining the half-life of the mRNA (e.g., in a plasma, serum, cell, or tissue sample) and/or determining the area under the curve (AUC) of the protein expression by the mRNA over time (e.g., in vitro or in vivo). An mRNA is identified as having increased stability if the half-life and/or the AUC is greater than the half-life and/or the AUC of a corresponding wild-type mRNA under the same conditions.

[0164] In some embodiments, the mRNA of the present invention induces a detectably lower immune response (e.g., innate or acquired) relative to the immune response induced by a corresponding wild-type mRNA under the same conditions. In other embodiments, the mRNA of the present disclosure induces a detectably lower immune response (e.g., innate or acquired) relative to the immune response induced by an mRNA that encodes for a wound healing polypeptide but does not comprise modified uracil under the same conditions, or relative to the immune response induced by an mRNA that encodes for a wound healing polypeptide and that comprises modified uracil but that does not have adjusted uracil content under the same conditions. The innate immune response can be manifested by increased expression of pro-inflammatory cytokines, activation of intracellular PRRs (RIG-I, MDAS, etc.), cell death, and/or termination or reduction in protein translation. In some embodiments, a reduction in the innate immune response can be measured by expression or activity level of Type 1 interferons (e.g., IFN-α, IFN-β, IFN-κ, IFN-δ, IFN-ε, IFN-τ, IFN-ω, and IFN-ξ) or the expression of interferon-regulated genes such as the toll-like receptors (e.g., TLR7 and TLR8), and/or by decreased cell death following one or more administrations of the mRNA of the invention into a cell.

[0165] In some embodiments, the expression of Type-1 interferons by a mammalian cell in response to the mRNA of the present disclosure is reduced by at least 10%, 20%, 30%, 40%, 50%, 60%, 70%, 80%, 90%, 95%, 99%, 99.9%, or greater than 99.9% relative to a corresponding wild-type mRNA, to an mRNA that encodes a wound healing polypeptide but does not comprise modified uracil, or to an mRNA that encodes a wound healing polypeptide and that comprises modified uracil but that does not have adjusted uracil content. In some embodiments, the interferon is IFN-β. In some embodiments, cell death frequency caused by administration of mRNA of the present disclosure to a mammalian cell is 10%, 25%, 50%, 75%, 85%, 90%, 95%, or over 95% less than the cell death frequency observed with a corresponding wild-type mRNA, an mRNA that encodes for a wound healing polypeptide but does not comprise modified uracil, or an mRNA that encodes for a wound healing polypeptide and that comprises modified uracil but that does not have adjusted uracil content. In some embodiments, the mammalian cell is a BJ fibroblast cell. In other embodiments, the mammalian cell is a splenocyte. In some embodiments, the mammalian cell is that of a mouse or a rat. In other embodiments, the mammalian cell is that of a human. In one embodiment, the mRNA of the present disclosure does not substantially induce an innate immune response of a mammalian cell into which the mRNA is introduced.

### 9. METHODS FOR MODIFYING POLYNUCLEOTIDES

[0166] The disclosure includes modified polynucleotides comprising a polynucleotide described herein (e.g., a polynucleotide, e.g. mRNA, comprising a nucleotide sequence encoding a wound healing polypeptide). The modified polynucleotides can be chemically modified and/or structurally modified. When the polynucleotides of the present invention are chemically and/or structurally modified the polynucleotides can be referred to as “modified polynucleotides.”

[0167] The present disclosure provides for modified nucleosides and nucleotides of a polynucleotide (e.g., RNA polynucleotides, such as mRNA polynucleotides) encoding a wound healing polypeptide. A “nucleoside” refers to a compound containing a sugar molecule (e.g., a pentose or ribose) or a derivative thereof in combination with an organic base (e.g., a purine or pyrimidine) or a derivative thereof (also referred to herein as “nucleobase”). A “nucleotide” refers to a nucleoside including a phosphate group. Modified nucleotides can be synthesized by any useful method, such as, for example, chemically, enzymatically, or recombinantly, to include one or more modified or non-natural nucleosides. Polynucleotides can comprise a region or regions of linked nucleosides. Such regions can have variable backbone linkages. The linkages can be standard phosphodiester linkages, in which case the polynucleotides would comprise regions of nucleotides.

[0168] The modified polynucleotides disclosed herein can comprise various distinct modifications. In some embodiments, the modified polynucleotides contain one, two, or more (optionally different) nucleoside or nucleotide modifications. In some embodiments, a modified polynucleotide, introduced to a cell can exhibit one or more desirable properties, e.g., improved protein expression, reduced immunogenicity, or reduced degradation in the cell, as compared to an unmodified polynucleotide.

[0169] In some embodiments, a polynucleotide of the present invention (e.g., a polynucleotide comprising a nucleotide sequence encoding a wound healing polypeptide) is structurally modified. As used herein, a “structural” modification is one in which two or more linked nucleosides are inserted, deleted, duplicated, inverted or randomized in a polynucleotide without significant chemical modification to the nucleotides themselves. Because chemical bonds will necessarily be broken and reformed to effect a structural modification, structural modifications are of a chemical nature and hence are chemical modifications. However, structural modifications will result in a different sequence of nucleotides. For example, the polynucleotide “ATCG” can be chemically modified to “AT-5meC-G”. The same polynucleotide can be structurally modified from “ATCG” to “ATCCCG”. Here, the dinucleotide “CC” has been inserted, resulting in a structural modification to the polynucleotide.

[0170] Therapeutic compositions of the present disclosure comprise, in some embodiments, at least one nucleic acid (e.g., RNA) having an open reading frame encoding a wound healing polypeptide, wherein the nucleic acid comprises nucleotides and/or nucleosides that can be standard (unmodified) or modified as is known in the art. In some embodiments, nucleotides and nucleosides of the present disclosure comprise modified nucleotides or nucleosides. Such modified nucleotides and nucleosides can be naturally-occurring modified nucleotides and nucleosides or non-naturally occurring modified nucleotides and nucleosides. Such modifications can include those at the sugar, backbone, or nucleobase portion of the nucleotide and/or nucleoside as are recognized in the art.

[0171] In some embodiments, a naturally-occurring modified nucleotide or nucleotide of the disclosure is one as is generally known or recognized in the art. Non-limiting examples of such naturally occurring modified nucleotides and nucleotides can be found, inter alia, in the widely recognized MODOMICS database.

[0172] In some embodiments, a non-naturally occurring modified nucleotide or nucleoside of the disclosure is one as is generally known or recognized in the art. Non-limiting examples of such non-naturally occurring modified nucleotides and nucleosides can be found, inter alia, in published US application Nos. PCT/US2012/058519; PCT/US2013/075177; PCT/US2014/058897; PCT/US2014/058891; PCT/US2014/070413; PCT/US2015/36773; PCT/US2015/36759; PCT/US2015/36771; or PCT/IB2017/051367 all of which are incorporated by reference herein.

[0173] In some embodiments, at least one RNA (e.g., mRNA) of the present disclosure is not chemically modified and comprises the standard ribonucleotides consisting of adenosine, guanosine, cytosine and uridine. In some embodiments, nucleotides and nucleosides of the present disclosure comprise standard nucleoside residues such as those present in transcribed RNA (e.g. A, G, C, or U). In some embodiments, nucleotides and nucleosides of the present disclosure comprise standard deoxyribonucleosides such as those present in DNA (e.g. dA, dG, dC, or dT).

[0174] Hence, nucleic acids of the disclosure (e.g., DNA nucleic acids and RNA nucleic acids, such as mRNA nucleic acids) can comprise standard nucleotides and nucleosides, naturally-occurring nucleotides and nucleosides, non-naturally-occurring nucleotides and nucleosides, or any combination thereof.

[0175] Nucleic acids of the disclosure (e.g., DNA nucleic acids and RNA nucleic acids, such as mRNA nucleic acids), in some embodiments, comprise various (more than one) different types of standard and/or modified nucleotides and nucleosides. In some embodiments, a particular region of a nucleic acid contains one, two or more (optionally different) types of standard and/or modified nucleotides and nucleosides.

[0176] In some embodiments, a modified RNA nucleic acid (e.g., a modified mRNA nucleic acid), introduced to a cell or organism, exhibits reduced degradation in the cell or organism, respectively, relative to an unmodified nucleic acid comprising standard nucleotides and nucleosides.

[0177] In some embodiments, a modified RNA nucleic acid (e.g., a modified mRNA nucleic acid), introduced into a cell or organism, may exhibit reduced immunogenicity in the cell or organism, respectively (e.g., a reduced innate response) relative to an unmodified nucleic acid comprising standard nucleotides and nucleosides.

[0178] Nucleic acids (e.g., RNA nucleic acids, such as mRNA nucleic acids), in some embodiments, comprise non-natural modified nucleotides that are introduced during synthesis or post-synthesis of the nucleic acids to achieve desired functions or properties. The modifications may be present on internucleotide linkages, purine or pyrimidine bases, or sugars. The modification may be introduced with chemical synthesis or with a polymerase enzyme at the terminal of a chain or anywhere else in the chain. Any of the regions of a nucleic acid may be chemically modified.

[0179] The present disclosure provides for modified nucleosides and nucleotides of a nucleic acid (e.g., RNA nucleic acids, such as mRNA nucleic acids). A “nucleoside” refers to a compound containing a sugar molecule (e.g., a pentose or ribose) or a derivative thereof in combination with an organic base (e.g., a purine or pyrimidine) or a derivative thereof (also referred to herein as “nucleobase”). A “nucleotide” refers to a nucleoside, including a phosphate group. Modified nucleotides may by synthesized by any useful method, such as, for example, chemically, enzymatically, or recombinantly, to include one or more modified or non-natural nucleosides. Nucleic acids can comprise a region or regions of linked nucleosides. Such regions may have variable backbone linkages. The linkages can be standard phosphodiester linkages, in which case the nucleic acids would comprise regions of nucleotides.

[0180] Modified nucleotide base pairing encompasses not only the standard adenosine-thymine, adenosine-uracil, or guanosine-cytosine base pairs, but also base pairs formed between nucleotides and/or modified nucleotides comprising non-standard or modified bases, wherein the arrangement of hydrogen bond donors and hydrogen bond acceptors permits hydrogen bonding between a non-standard base and a standard base or between two complementary non-standard base structures, such as, for example, in those nucleic acids having at least one chemical modification. One example of such non-standard base pairing is the base pairing between the modified nucleotide inosine and adenine, cytosine or uracil. Any combination of base/sugar or linker may be incorporated into nucleic acids of the present disclosure.

[0181] In some embodiments, modified nucleobases in nucleic acids (e.g., RNA nucleic acids, such as mRNA nucleic acids) comprise N1-methyl-pseudouridine (m1ψ), 1-ethyl-pseudouridine (e1ψ), 5-methoxy-uridine (mo5U), 5-methyl-cytidine (m5C), and/or pseudouridine (ψ). In some embodiments, modified nucleobases in nucleic acids (e.g., RNA nucleic acids, such as mRNA nucleic acids) comprise 5-methoxymethyl uridine, 5-methylthio uridine, 1-methoxymethyl pseudouridine, 5-methyl cytidine, and/or 5-methoxy cytidine. In some embodiments, the polyribonucleotide includes a combination of at least two (e.g., 2, 3, 4 or more) of any of the aforementioned modified nucleobases, including but not limited to chemical modifications.

[0182] In some embodiments, a RNA nucleic acid of the disclosure comprises N1-methyl-pseudouridine (m1ψ) substitutions at one or more or all uridine positions of the nucleic acid.

[0183] In some embodiments, a RNA nucleic acid of the disclosure comprises N1-methyl-pseudouridine (m1ψ) substitutions at one or more or all uridine positions of the nucleic acid and 5-methyl cytidine substitutions at one or more or all cytidine positions of the nucleic acid.

[0184] In some embodiments, a RNA nucleic acid of the disclosure comprises pseudouridine (ψ) substitutions at one or more or all uridine positions of the nucleic acid.

[0185] In some embodiments, a RNA nucleic acid of the disclosure comprises pseudouridine (ψ) substitutions at one or more or all uridine positions of the nucleic acid and 5-methyl cytidine substitutions at one or more or all cytidine positions of the nucleic acid.

[0186] In some embodiments, a RNA nucleic acid of the disclosure comprises uridine at one or more or all uridine positions of the nucleic acid.

[0187] In some embodiments, nucleic acids (e.g., RNA nucleic acids, such as mRNA nucleic acids) are uniformly modified (e.g., fully modified, modified throughout the entire sequence) for a particular modification. For example, a nucleic acid can be uniformly modified with N1-methyl-pseudouridine, meaning that all uridine residues in the mRNA sequence are replaced with N1-methyl-pseudouridine. Similarly, a nucleic acid can be uniformly modified for any type of nucleoside residue present in the sequence by replacement with a modified residue such as those set forth above.

[0188] The nucleic acids of the present disclosure may be partially or fully modified along the entire length of the molecule. For example, one or more or all or a given type of nucleotide (e.g., purine or pyrimidine, or any one or more or all of A, G, U, C) may be uniformly modified in a nucleic acid of the disclosure, or in a predetermined sequence region thereof (e.g., in the mRNA including or excluding the polyA tail). In some embodiments, all nucleotides X in a nucleic acid of the present disclosure (or in a sequence region thereof) are modified nucleotides, wherein X may be any one of nucleotides A, G, U, C, or any one of the combinations A+G, A+U, A+C, G+U, G+C, U+C, A+G+U, A+G+C, G+U+C or A+G+C.

[0189] The nucleic acid may contain from about 1% to about 100% modified nucleotides (either in relation to overall nucleotide content, or in relation to one or more types of nucleotide, i.e., any one or more of A, G, U or C) or any intervening percentage (e.g., from 1% to 20%, from 1% to 25%, from 1% to 50%, from 1% to 60%, from 1% to 70%, from 1% to 80%, from 1% to 90%, from 1% to 95%, from 10% to 20%, from 10% to 25%, from 10% to 50%, from 10% to 60%, from 10% to 70%, from 10% to 80%, from 10% to 90%, from 10% to 95%, from 10% to 100%, from 20% to 25%, from 20% to 50%, from 20% to 60%, from 20% to 70%, from 20% to 80%, from 20% to 90%, from 20% to 95%, from 20% to 100%, from 50% to 60%, from 50% to 70%, from 50% to 80%, from 50% to 90%, from 50% to 95%, from 50% to 100%, from 70% to 80%, from 70% to 90%, from 70% to 95%, from 70% to 100%, from 80% to 90%, from 80% to 95%, from 80% to 100%, from 90% to 95%, from 90% to 100%, and from 95% to 100%). It will be understood that any remaining percentage is accounted for by the presence of unmodified A, G, U, or C.

[0190] The nucleic acids may contain at a minimum 1% and at maximum 100% modified nucleotides, or any intervening percentage, such as at least 5% modified nucleotides, at least 10% modified nucleotides, at least 25% modified nucleotides, at least 50% modified nucleotides, at least 80% modified nucleotides, or at least 90% modified nucleotides. For example, the nucleic acids may contain a modified pyrimidine such as a modified uracil or cytosine. In some embodiments, at least 5%, at least 10%, at least 25%, at least 50%, at least 80%, at least 90% or 100% of the uracil in the nucleic acid is replaced with a modified uracil (e.g., a 5-substituted uracil). The modified uracil can be replaced by a compound having a single unique structure, or can be replaced by a plurality of compounds having different structures (e.g., 2, 3, 4 or more unique structures). In some embodiments, at least 5%, at least 10%, at least 25%, at least 50%, at least 80%, at least 90% or 100% of the cytosine in the nucleic acid is replaced with a modified cytosine (e.g., a 5-substituted cytosine). The modified cytosine can be replaced by a compound having a single unique structure, or can be replaced by a plurality of compounds having different structures (e.g., 2, 3, 4 or more unique structures).

### 10. UNTRANSLATED REGIONS (UTRS)

[0191] Translation of a polynucleotide comprising an open reading frame encoding a polypeptide can be controlled and regulated by a variety of mechanisms that are provided by various cis-acting nucleic acid structures. For example, naturally-occurring, cis-acting RNA elements that form hairpins or other higher-order (e.g., pseudoknot) intramolecular mRNA secondary structures can provide a translational regulatory activity to a polynucleotide, wherein the RNA element influences or modulates the initiation of polynucleotide translation, particularly when the RNA element is positioned in the 5′ UTR close to the 5′-cap structure (Pelletier and Sonenberg (1985) Cell 40(3):515-526; Kozak (1986) Proc Natl Acad Sci 83:2850-2854).

[0192] Untranslated regions (UTRs) are nucleic acid sections of a polynucleotide before a start codon (5′ UTR) and after a stop codon (3′ UTR) that are not translated. In some embodiments, a polynucleotide (e.g., a ribonucleic acid (RNA), e.g., a messenger RNA (mRNA)) of the invention comprising an open reading frame (ORF) encoding a wound healing polypeptide further comprises UTR (e.g., a 5′ UTR or functional fragment thereof, a 3′ UTR or functional fragment thereof, or a combination thereof).

[0193] Cis-acting RNA elements can also affect translation elongation, being involved in numerous frameshifting events (Namy et al., (2004) Mol Cell 13(2):157-168). Internal ribosome entry sequences (IRES) represent another type of cis-acting RNA element that are typically located in 5′ UTRs, but have also been reported to be found within the coding region of naturally-occurring mRNAs (Holcik et al. (2000) Trends Genet 16(10):469-473). In cellular mRNAs, IRES often coexist with the 5′-cap structure and provide mRNAs with the functional capacity to be translated under conditions in which cap-dependent translation is compromised (Gebauer et al., (2012) Cold Spring Harb Perspect Biol 4(7):a012245). Another type of naturally-occurring cis-acting RNA element comprises upstream open reading frames (uORFs). Naturally-occurring uORFs occur singularly or multiply within the 5′ UTRs of numerous mRNAs and influence the translation of the downstream major ORF, usually negatively (with the notable exception of GCN4 mRNA in yeast and ATF4 mRNA in mammals, where uORFs serve to promote the translation of the downstream major ORF under conditions of increased eIF2 phosphorylation (Hinnebusch (2005) Annu Rev Microbiol 59:407-450)). Additional exemplary translational regulatory activities provided by components, structures, elements, motifs, and/or specific sequences comprising polynucleotides (e.g., mRNA) include, but are not limited to, mRNA stabilization or destabilization (Baker & Parker (2004) Curr Opin Cell Biol 16(3):293-299), translational activation (Villalba et al., (2011) Curr Opin Genet Dev 21(4):452-457), and translational repression (Blumer et al., (2002) Mech Dev 110(1-2):97-112). Studies have shown that naturally-occurring, cis-acting RNA elements can confer their respective functions when used to modify, by incorporation into, heterologous polynucleotides (Goldberg-Cohen et al., (2002) J Biol Chem 277(16):13635-13640).

### Modified Polynucleotides Comprising Functional RNA Elements

[0194] The present disclosure provides synthetic polynucleotides comprising a modification (e.g., an RNA element), wherein the modification provides a desired translational regulatory activity. In some embodiments, the disclosure provides a polynucleotide comprising a 5′ untranslated region (UTR), an initiation codon, a full open reading frame encoding a polypeptide, a 3′ UTR, and at least one modification, wherein the at least one modification provides a desired translational regulatory activity, for example, a modification that promotes and/or enhances the translational fidelity of mRNA translation. In some embodiments, the desired translational regulatory activity is a cis-acting regulatory activity. In some embodiments, the desired translational regulatory activity is an increase in the residence time of the 43S pre-initiation complex (PIC) or ribosome at, or proximal to, the initiation codon. In some embodiments, the desired translational regulatory activity is an increase in the initiation of polypeptide synthesis at or from the initiation codon. In some embodiments, the desired translational regulatory activity is an increase in the amount of polypeptide translated from the full open reading frame. In some embodiments, the desired translational regulatory activity is an increase in the fidelity of initiation codon decoding by the PIC or ribosome. In some embodiments, the desired translational regulatory activity is inhibition or reduction of leaky scanning by the PIC or ribosome. In some embodiments, the desired translational regulatory activity is a decrease in the rate of decoding the initiation codon by the PIC or ribosome. In some embodiments, the desired translational regulatory activity is inhibition or reduction in the initiation of polypeptide synthesis at any codon within the mRNA other than the initiation codon. In some embodiments, the desired translational regulatory activity is inhibition or reduction of the amount of polypeptide translated from any open reading frame within the mRNA other than the full open reading frame. In some embodiments, the desired translational regulatory activity is inhibition or reduction in the production of aberrant translation products. In some embodiments, the desired translational regulatory activity is a combination of one or more of the foregoing translational regulatory activities.

[0195] Accordingly, the present disclosure provides a polynucleotide, e.g., an mRNA, comprising an RNA element that comprises a sequence and/or an RNA secondary structure(s) that provides a desired translational regulatory activity as described herein. In some aspects, the mRNA comprises an RNA element that comprises a sequence and/or an RNA secondary structure(s) that promotes and/or enhances the translational fidelity of mRNA translation. In some aspects, the mRNA comprises an RNA element that comprises a sequence and/or an RNA secondary structure(s) that provides a desired translational regulatory activity, such as inhibiting and/or reducing leaky scanning. In some aspects, the disclosure provides an mRNA that comprises an RNA element that comprises a sequence and/or an RNA secondary structure(s) that inhibits and/or reduces leaky scanning thereby promoting the translational fidelity of the mRNA.

[0196] In some embodiments, the RNA element comprises natural and/or modified nucleotides. In some embodiments, the RNA element comprises of a sequence of linked nucleotides, or derivatives or analogs thereof, that provides a desired translational regulatory activity as described herein. In some embodiments, the RNA element comprises a sequence of linked nucleotides, or derivatives or analogs thereof, that forms or folds into a stable RNA secondary structure, wherein the RNA secondary structure provides a desired translational regulatory activity as described herein. RNA elements can be identified and/or characterized based on the primary sequence of the element (e.g., GC-rich element), by RNA secondary structure formed by the element (e.g. stem-loop), by the location of the element within the RNA molecule (e.g., located within the 5′ UTR of an mRNA), by the biological function and/or activity of the element (e.g., “translational enhancer element”), and any combination thereof.

[0197] In some aspects, the disclosure provides an mRNA having one or more structural modifications that inhibits leaky scanning and/or promotes the translational fidelity of mRNA translation, wherein at least one of the structural modifications is a GC-rich RNA element. In some aspects, the disclosure provides a modified mRNA comprising at least one modification, wherein at least one modification is a GC-rich RNA element comprising a sequence of linked nucleotides, or derivatives or analogs thereof, preceding a Kozak consensus sequence in a 5′ UTR of the mRNA. In one embodiment, the GC-rich RNA element is located about 30, about 25, about 20, about 15, about 10, about 5, about 4, about 3, about 2, or about 1 nucleotide(s) upstream of a Kozak consensus sequence in the 5′ UTR of the mRNA. In another embodiment, the GC-rich RNA element is located 15-30, 15-20, 15-25, 10-15, or 5-10 nucleotides upstream of a Kozak consensus sequence. In another embodiment, the GC-rich RNA element is located immediately adjacent to a Kozak consensus sequence in the 5′ UTR of the mRNA.

[0198] In any of the foregoing or related aspects, the disclosure provides a GC-rich RNA element which comprises a sequence of 3-30, 5-25, 10-20, 15-20, about 20, about 15, about 12, about 10, about 7, about 6 or about 3 nucleotides, derivatives or analogs thereof, linked in any order, wherein the sequence composition is 70-80% cytosine, 60-70% cytosine, 50%-60% cytosine, 40-50% cytosine, 30-40% cytosine bases. In any of the foregoing or related aspects, the disclosure provides a GC-rich RNA element which comprises a sequence of 3-30, 5-25, 10-20, 15-20, about 20, about 15, about 12, about 10, about 7, about 6 or about 3 nucleotides, derivatives or analogs thereof, linked in any order, wherein the sequence composition is about 80% cytosine, about 70% cytosine, about 60% cytosine, about 50% cytosine, about 40% cytosine, or about 30% cytosine.

[0199] In any of the foregoing or related aspects, the disclosure provides a GC-rich RNA element which comprises a sequence of 20, 19, 18, 17, 16, 15, 14, 13, 12, 11, 10, 9, 8, 7, 6, 5, 4, or 3 nucleotides, or derivatives or analogs thereof, linked in any order, wherein the sequence composition is 70-80% cytosine, 60-70% cytosine, 50%-60% cytosine, 40-50% cytosine, or 30-40% cytosine. In any of the foregoing or related aspects, the disclosure provides a GC-rich RNA element which comprises a sequence of 20, 19, 18, 17, 16, 15, 14, 13, 12, 11, 10, 9, 8, 7, 6, 5, 4, or 3 nucleotides, or derivatives or analogs thereof, linked in any order, wherein the sequence composition is about 80% cytosine, about 70% cytosine, about 60% cytosine, about 50% cytosine, about 40% cytosine, or about 30% cytosine.

[0200] In some embodiments, the disclosure provides a modified mRNA comprising at least one modification, wherein at least one modification is a GC-rich RNA element comprising a sequence of linked nucleotides, or derivatives or analogs thereof, preceding a Kozak consensus sequence in a 5′ UTR of the mRNA, wherein the GC-rich RNA element is located about 30, about 25, about 20, about 15, about 10, about 5, about 4, about 3, about 2, or about 1 nucleotide(s) upstream of a Kozak consensus sequence in the 5′ UTR of the mRNA, and wherein the GC-rich RNA element comprises a sequence of 3, 4, 5, 6, 7, 8, 9, 10, 11, 12, 13, 14, 15, 16, 17, 18, 19, or 20 nucleotides, or derivatives or analogs thereof, linked in any order, wherein the sequence composition is >50% cytosine. In some embodiments, the sequence composition is >55% cytosine, >60% cytosine, >65% cytosine, >70% cytosine, >75% cytosine, >80% cytosine, >85% cytosine, or >90% cytosine.

[0201] In other aspects, the disclosure provides a modified mRNA comprising at least one modification, wherein at least one modification is a GC-rich RNA element comprising a sequence of linked nucleotides, or derivatives or analogs thereof, preceding a Kozak consensus sequence in a 5′ UTR of the mRNA, wherein the GC-rich RNA element is located about 30, about 25, about 20, about 15, about 10, about 5, about 4, about 3, about 2, or about 1 nucleotide(s) upstream of a Kozak consensus sequence in the 5′ UTR of the mRNA, and wherein the GC-rich RNA element comprises a sequence of about 3-30, 5-25, 10-20, 15-20 or about 20, about 15, about 12, about 10, about 6 or about 3 nucleotides, or derivatives or analogues thereof, wherein the sequence comprises a repeating GC-motif, wherein the repeating GC-motif is [CCG]n, wherein n=1 to 10 (SEQ ID NO:257), n=2 to 8 (SEQ ID NO:258), n=3 to 6 (SEQ ID NO:259), or n=4 to 5 (SEQ ID NO:260). In some embodiments, the sequence comprises a repeating GC-motif [CCG]n, wherein n=1, 2, 3, 4 or 5 (SEQ ID NO:261). In some embodiments, the sequence comprises a repeating GC-motif [CCG]n, wherein n=1, 2, or 3. In some embodiments, the sequence comprises a repeating GC-motif [CCG]n, wherein n=1. In some embodiments, the sequence comprises a repeating GC-motif [CCG]n, wherein n=2. In some embodiments, the sequence comprises a repeating GC-motif [CCG]n, wherein n=3. In some embodiments, the sequence comprises a repeating GC-motif [CCG]n, wherein n=4 (SEQ ID NO:262). In some embodiments, the sequence comprises a repeating GC-motif [CCG]n, wherein n=5 (SEQ ID NO:263).

[0202] In another aspect, the disclosure provides a modified mRNA comprising at least one modification, wherein at least one modification is a GC-rich RNA element comprising a sequence of linked nucleotides, or derivatives or analogs thereof, preceding a Kozak consensus sequence in a 5′ UTR of the mRNA, wherein the GC-rich RNA element comprises any one of the sequences set forth in Table 3. In one embodiment, the GC-rich RNA element is located about 30, about 25, about 20, about 15, about 10, about 5, about 4, about 3, about 2, or about 1 nucleotide(s) upstream of a Kozak consensus sequence in the 5′ UTR of the mRNA. In another embodiment, the GC-rich RNA element is located about 15-30, 15-20, 15-25, 10-15, or 5-10 nucleotides upstream of a Kozak consensus sequence. In another embodiment, the GC-rich RNA element is located immediately adjacent to a Kozak consensus sequence in the 5′ UTR of the mRNA.

[0203] In other aspects, the disclosure provides a modified mRNA comprising at least one modification, wherein at least one modification is a GC-rich RNA element comprising the sequence V1 [CCCCGGCGCC (SEQ ID NO:43)] as set forth in Table 3, or derivatives or analogs thereof, preceding a Kozak consensus sequence in the 5′ UTR of the mRNA. In some embodiments, the GC-rich element comprises the sequence V1 as set forth in Table 3 located immediately adjacent to and upstream of the Kozak consensus sequence in the 5′ UTR of the mRNA. In some embodiments, the GC-rich element comprises the sequence V1 as set forth in Table 3 located 1, 2, 3, 4, 5, 6, 7, 8, 9 or 10 bases upstream of the Kozak consensus sequence in the 5′ UTR of the mRNA. In other embodiments, the GC-rich element comprises the sequence V1 as set forth in Table 3 located 1-3, 3-5, 5-7, 7-9, 9-12, or 12-15 bases upstream of the Kozak consensus sequence in the 5′ UTR of the mRNA.

[0204] In other aspects, the disclosure provides a modified mRNA comprising at least one modification, wherein at least one modification is a GC-rich RNA element comprising the sequence V2 [CCCCGGC (SEQ ID NO:44)] as set forth in Table 3, or derivatives or analogs thereof, preceding a Kozak consensus sequence in the 5′ UTR of the mRNA. In some embodiments, the GC-rich element comprises the sequence V2 as set forth in Table 3 located immediately adjacent to and upstream of the Kozak consensus sequence in the 5′ UTR of the mRNA. In some embodiments, the GC-rich element comprises the sequence V2 as set forth in Table 3 located 1, 2, 3, 4, 5, 6, 7, 8, 9 or 10 bases upstream of the Kozak consensus sequence in the 5′ UTR of the mRNA. In other embodiments, the GC-rich element comprises the sequence V2 as set forth in Table 3 located 1-3, 3-5, 5-7, 7-9, 9-12, or 12-15 bases upstream of the Kozak consensus sequence in the 5′ UTR of the mRNA.

[0205] In other aspects, the disclosure provides a modified mRNA comprising at least one modification, wherein at least one modification is a GC-rich RNA element comprising the sequence EK [GCCGCC (SEQ ID NO:42)] as set forth in Table 3, or derivatives or analogs thereof, preceding a Kozak consensus sequence in the 5′ UTR of the mRNA. In some embodiments, the GC-rich element comprises the sequence EK as set forth in Table 3 located immediately adjacent to and upstream of the Kozak consensus sequence in the 5′ UTR of the mRNA. In some embodiments, the GC-rich element comprises the sequence EK as set forth in Table 3 located 1, 2, 3, 4, 5, 6, 7, 8, 9 or 10 bases upstream of the Kozak consensus sequence in the 5′ UTR of the mRNA. In other embodiments, the GC-rich element comprises the sequence EK as set forth in Table 3 located 1-3, 3-5, 5-7, 7-9, 9-12, or 12-15 bases upstream of the Kozak consensus sequence in the 5′ UTR of the mRNA.

[0206] In yet other aspects, the disclosure provides a modified mRNA comprising at least one modification, wherein at least one modification is a GC-rich RNA element comprising the sequence V1 [CCCCGGCGCC (SEQ ID NO:43)] as set forth in Table 3, or derivatives or analogs thereof, preceding a Kozak consensus sequence in the 5′ UTR of the mRNA, wherein the 5′ UTR comprises the following sequence shown in Table 3:

[0207] GGGAAAUAAGAGAGAAAAGAAGAGUAAGAAGAAAUAUAAGA (SEQ ID NO:85). The skilled artisan will of course recognize that all Us in the RNA sequences described herein will be Ts in a corresponding template DNA sequence, for example, in DNA templates or constructs from which mRNAs of the disclosure are transcribed, e.g., via IVT.

[0208] In some embodiments, the GC-rich element comprises the sequence V1 as set forth in Table 3 located immediately adjacent to and upstream of the Kozak consensus sequence in the 5′ UTR sequence shown in Table 3. In some embodiments, the GC-rich element comprises the sequence V1 as set forth in Table 3 located 1, 2, 3, 4, 5, 6, 7, 8, 9 or 10 bases upstream of the Kozak consensus sequence in the 5′ UTR of the mRNA, wherein the 5′ UTR comprises the following sequence shown in Table 3:

(SEQ ID NO: 85)
GGGAAAUAAGAGAGAAAAGAAGAGUAAGAAGAAAUAUAAGA.

[0209] In other embodiments, the GC-rich element comprises the sequence V1 as set forth in Table 3 located 1-3, 3-5, 5-7, 7-9, 9-12, or 12-15 bases upstream of the Kozak consensus sequence in the 5′ UTR of the mRNA, wherein the 5′ UTR comprises the following sequence shown in Table 3:

(SEQ ID NO: 85)
GGGAAAUAAGAGAGAAAAGAAGAGUAAGAAGAAAUAUAAGA.

[0210] In some embodiments, the 5′ UTR comprises the following sequence set forth in Table 3:

(SEQ ID NO: 39)
GGGAAAUAAGAGAGAAAAGAAGAGUAAGAAGAAAUAUAAGACC
CCGGCGCCGCCACC

TABLE 3

| 5′ UTRs | 5′ UTR Sequence |
|---|---|
| Standard | GGGAAAUAAGAGAGAAAAGAAGAGUAAGAAG |
| | AAAUAUAAGAGCCACC (SEQ ID NO: 3) |
| V1-UTR | GGGAAAUAAGAGAGAAAAGAAGAGUAAGAAG |
| | AAAUAUAAGACCCCGGCGCCGCCACC |
| | (SEQ ID NO: 39) |
| V2-UTR | GGGAAAUAAGAGAGAAAAGAAGAGUAAGAAG |
| | AAAUAUAAGACCCCGGCGCCACC |
| | (SEQ ID NO: 40) |
| GC-Rich RNA Elements | Sequence |
| K0 (Traditional | [GCCA/GCC] (SEQ ID NO: 41) |
| Kozak consensus) | |
| EK | [GCCGCC] (SEQ ID NO: 42) |
| V1 | [CCCCGGCGCC] (SEQ ID NO: 43) |
| V2 | [CCCCGGC] (SEQ ID NO: 44) |
| (CCG)ₙ, where n10 | [CCG]ₙ (SEQ ID NO: 257) |
| (GCC)ₙ, where n10 | [GCC]ₙ (SEQ ID NO: 264) |

[0211] In another aspect, the disclosure provides a modified mRNA comprising at least one modification, wherein at least one modification is a GC-rich RNA element comprising a stable RNA secondary structure comprising a sequence of nucleotides, or derivatives or analogs thereof, linked in an order which forms a hairpin or a stem-loop. In one embodiment, the stable RNA secondary structure is upstream of the Kozak consensus sequence. In another embodiment, the stable RNA secondary structure is located about 30, about 25, about 20, about 15, about 10, or about 5 nucleotides upstream of the Kozak consensus sequence. In another embodiment, the stable RNA secondary structure is located about 20, about 15, about 10 or about 5 nucleotides upstream of the Kozak consensus sequence. In another embodiment, the stable RNA secondary structure is located about 5, about 4, about 3, about 2, about 1 nucleotides upstream of the Kozak consensus sequence. In another embodiment, the stable RNA secondary structure is located about 15-30, about 15-20, about 15-25, about 10-15, or about 5-10 nucleotides upstream of the Kozak consensus sequence. In another embodiment, the stable RNA secondary structure is located 12-15 nucleotides upstream of the Kozak consensus sequence. In another embodiment, the stable RNA secondary structure has a deltaG of about −30 kcal/mol, about −20 to −30 kcal/mol, about −20 kcal/mol, about −10 to −20 kcal/mol, about −10 kcal/mol, about −5 to ˜10 kcal/mol.

[0212] In another embodiment, the modification is operably linked to an open reading frame encoding a polypeptide and wherein the modification and the open reading frame are heterologous.

[0213] In another embodiment, the sequence of the GC-rich RNA element is comprised exclusively of guanine (G) and cytosine (C) nucleobases.

[0214] RNA elements that provide a desired translational regulatory activity as described herein can be identified and characterized using known techniques, such as ribosome profiling. Ribosome profiling is a technique that allows the determination of the positions of PICs and/or ribosomes bound to mRNAs (see e.g., Ingolia et al., (2009) Science 324(5924):218-23, incorporated herein by reference). The technique is based on protecting a region or segment of mRNA, by the PIC and/or ribosome, from nuclease digestion. Protection results in the generation of a 30-bp fragment of RNA termed a ‘footprint’. The sequence and frequency of RNA footprints can be analyzed by methods known in the art (e.g., RNA-seq). The footprint is roughly centered on the A-site of the ribosome. If the PIC or ribosome dwells at a particular position or location along an mRNA, footprints generated at these position would be relatively common. Studies have shown that more footprints are generated at positions where the PIC and/or ribosome exhibits decreased processivity and fewer footprints where the PIC and/or ribosome exhibits increased processivity (Gardin et al., (2014) eLife 3:e03735). In some embodiments, residence time or the time of occupancy of the PIC or ribosome at a discrete position or location along a polynucleotide comprising any one or more of the RNA elements described herein is determined by ribosome profiling.

[0215] A UTR can be homologous or heterologous to the coding region in a polynucleotide. In some embodiments, the UTR is homologous to the ORF encoding the wound healing polypeptide. In some embodiments, the UTR is heterologous to the ORF encoding the wound healing polypeptide. In some embodiments, the polynucleotide comprises two or more 5′ UTRs or functional fragments thereof, each of which has the same or different nucleotide sequences. In some embodiments, the polynucleotide comprises two or more 3′ UTRs or functional fragments thereof, each of which has the same or different nucleotide sequences.

[0216] In some embodiments, the 5′ UTR or functional fragment thereof, 3′ UTR or functional fragment thereof, or any combination thereof is sequence optimized.

[0217] In some embodiments, the 5′UTR or functional fragment thereof, 3′ UTR or functional fragment thereof, or any combination thereof comprises at least one chemically modified nucleobase, e.g., N1-methylpseudouracil or 5-methoxyuracil.

[0218] UTRs can have features that provide a regulatory role, e.g., increased or decreased stability, localization and/or translation efficiency. A polynucleotide comprising a UTR can be administered to a cell, tissue, or organism, and one or more regulatory features can be measured using routine methods. In some embodiments, a functional fragment of a 5′ UTR or 3′ UTR comprises one or more regulatory features of a full length 5′ or 3′ UTR, respectively.

[0219] Natural 5′UTRs bear features that play roles in translation initiation. They harbor signatures like Kozak sequences that are commonly known to be involved in the process by which the ribosome initiates translation of many genes. Kozak sequences have the consensus CCR(A/G)CCAUGG (SEQ ID NO:87), where R is a purine (adenine or guanine) three bases upstream of the start codon (AUG), which is followed by another ‘G’. 5′ UTRs also have been known to form secondary structures that are involved in elongation factor binding.

[0220] By engineering the features typically found in abundantly expressed genes of specific target organs, one can enhance the stability and protein production of a polynucleotide. For example, introduction of 5′ UTR of liver-expressed mRNA, such as albumin, serum amyloid A, Apolipoprotein A/B/E, transferrin, alpha fetoprotein, erythropoietin, or Factor VIII, can enhance expression of polynucleotides in hepatic cell lines or liver. Likewise, use of 5′UTR from other tissue-specific mRNA to improve expression in that tissue is possible for muscle (e.g., MyoD, Myosin, Myoglobin, Myogenin, Herculin), for endothelial cells (e.g., Tie-1, CD36), for myeloid cells (e.g., C/EBP, AML1, G-CSF, GM-CSF, CDiib, MSR, Fr-1, i-NOS), for leukocytes (e.g., CD45, CD18), for adipose tissue (e.g., CD36, GLUT4, ACRP30, adiponectin) and for lung epithelial cells (e.g., SP-A/B/C/D).

[0221] In some embodiments, UTRs are selected from a family of transcripts whose proteins share a common function, structure, feature or property. For example, an encoded polypeptide can belong to a family of proteins (i.e., that share at least one function, structure, feature, localization, origin, or expression pattern), which are expressed in a particular cell, tissue or at some time during development. The UTRs from any of the genes or mRNA can be swapped for any other UTR of the same or different family of proteins to create a new polynucleotide.

[0222] In some embodiments, the 5′ UTR and the 3′ UTR can be heterologous. In some embodiments, the 5′ UTR can be derived from a different species than the 3′ UTR. In some embodiments, the 3′ UTR can be derived from a different species than the 5′ UTR.

[0223] Co-owned International Patent Application No. PCT/US2014/021522 (Publ. No. WO/2014/164253, incorporated herein by reference in its entirety) provides a listing of exemplary UTRs that can be utilized in the polynucleotide of the present invention as flanking regions to an ORF.

[0224] Exemplary UTRs of the application include, but are not limited to, one or more 5′UTR and/or 3′UTR derived from the nucleic acid sequence of: a globin, such as an α- or β-globin (e.g., a Xenopus, mouse, rabbit, or human globin); a strong Kozak translational initiation signal; a CYBA (e.g., human cytochrome b-245 α polypeptide); an albumin (e.g., human albumin 7); a HSD17B4 (hydroxysteroid (17-β) dehydrogenase); a virus (e.g., a tobacco etch virus (TEV), a Venezuelan equine encephalitis virus (VEEV), a Dengue virus, a cytomegalovirus (CMV) (e.g., CMV immediate early 1 (IE1)), a hepatitis virus (e.g., hepatitis B virus), a sindbis virus, or a PAV barley yellow dwarf virus); a heat shock protein (e.g., hsp70); a translation initiation factor (e.g., elF4G); a glucose transporter (e.g., hGLUT1 (human glucose transporter 1)); an actin (e.g., human α or β actin); a GAPDH; a tubulin; a histone; a citric acid cycle enzyme; a topoisomerase (e.g., a 5′UTR of a TOP gene lacking the 5′ TOP motif (the oligopyrimidine tract)); a ribosomal protein Large 32 (L32); a ribosomal protein (e.g., human or mouse ribosomal protein, such as, for example, rps9); an ATP synthase (e.g., ATP5A1 or the β subunit of mitochondrial H⁺-ATP synthase); a growth hormone e (e.g., bovine (bGH) or human (hGH)); an elongation factor (e.g., elongation factor 1 α1 (EEF1A1)); a manganese superoxide dismutase (MnSOD); a myocyte enhancer factor 2A (MEF2A); a β-F1-ATPase, a creatine kinase, a myoglobin, a granulocyte-colony stimulating factor (G-CSF); a collagen (e.g., collagen type I, alpha 2 (Col1A2), collagen type I, alpha 1 (Col1A1), collagen type VI, alpha 2 (Col6A2), collagen type VI, alpha 1 (Col6A1)); a ribophorin (e.g., ribophorin I (RPNI)); a low density lipoprotein receptor-related protein (e.g., LRP1); a cardiotrophin-like cytokine factor (e.g., Nnt1); calreticulin (Calr); a procollagen-lysine, 2-oxoglutarate 5-dioxygenase 1 (Plod1); and a nucleobindin (e.g., Nucb1).

[0225] In some embodiments, the 5′ UTR is selected from the group consisting of a β-globin 5′ UTR; a 5′UTR containing a strong Kozak translational initiation signal; a cytochrome b-245 α polypeptide (CYBA) 5′ UTR; a hydroxysteroid (17-β) dehydrogenase (HSD17B4) 5′ UTR; a Tobacco etch virus (TEV) 5′ UTR; a Venezuelen equine encephalitis virus (TEEV) 5′ UTR; a 5′ proximal open reading frame of rubella virus (RV) RNA encoding nonstructural proteins; a Dengue virus (DEN) 5′ UTR; a heat shock protein 70 (Hsp70) 5′ UTR; a eIF4G 5′ UTR; a GLUT1 5′ UTR; functional fragments thereof and any combination thereof.

[0226] In some embodiments, the 3′ UTR is selected from the group consisting of a β-globin 3′ UTR; a CYBA 3′ UTR; an albumin 3′ UTR; a growth hormone (GH) 3′ UTR; a VEEV 3′ UTR; a hepatitis B virus (HBV) 3′ UTR; α-globin 3′UTR; a DEN 3′ UTR; a PAV barley yellow dwarf virus (BYDV-PAV) 3′ UTR; an elongation factor 1 α1 (EEF1A1) 3′ UTR; a manganese superoxide dismutase (MnSOD) 3′ UTR; a β subunit of mitochondrial H(+)-ATP synthase (β-mRNA) 3′ UTR; a GLUT1 3′ UTR; a MEF2A 3′ UTR; a β-F1-ATPase 3′ UTR; functional fragments thereof and combinations thereof.

[0227] Wild-type UTRs derived from any gene or mRNA can be incorporated into the polynucleotides of the invention. In some embodiments, a UTR can be altered relative to a wild type or native UTR to produce a variant UTR, e.g., by changing the orientation or location of the UTR relative to the ORF; or by inclusion of additional nucleotides, deletion of nucleotides, swapping or transposition of nucleotides. In some embodiments, variants of 5′ or 3′ UTRs can be utilized, for example, mutants of wild type UTRs, or variants wherein one or more nucleotides are added to or removed from a terminus of the UTR.

[0228] Additionally, one or more synthetic UTRs can be used in combination with one or more non-synthetic UTRs. See, e.g., Mandal and Rossi, Nat. Protoc. 2013 8(3):568-82, the contents of which are incorporated herein by reference in their entirety.

[0229] UTRs or portions thereof can be placed in the same orientation as in the transcript from which they were selected or can be altered in orientation or location. Hence, a 5′ and/or 3′ UTR can be inverted, shortened, lengthened, or combined with one or more other 5′ UTRs or 3′ UTRs.

[0230] In some embodiments, the polynucleotide comprises multiple UTRs, e.g., a double, a triple or a quadruple 5′ UTR or 3′ UTR. For example, a double UTR comprises two copies of the same UTR either in series or substantially in series. For example, a double beta-globin 3′UTR can be used (see US2010/0129877, the contents of which are incorporated herein by reference in its entirety).

[0231] In certain embodiments, the polynucleotides of the invention comprise a 5′ UTR and/or a 3′ UTR selected from any of the UTRs disclosed herein. In some embodiments, the 5′ UTR comprises:

5′ UTR-001 (Upstream UTR)
(SEQ ID NO: 3)
(GGGAAAUAAGAGAGAAAAGAAGAGUAAGAAGAAAUAUAAGAGCCACC);
5′ UTR-002 (Upstream UTR)
(SEQ ID NO: 89)
(GGGAGAUCAGAGAGAAAAGAAGAGUAAGAAGAAAUAUAAGAGCCACC);
5′ UTR-003 (Upstream UTR) (See WO2016/100812);
5′ UTR-004 (Upstream UTR)
(SEQ ID NO: 90)
(GGGAGACAAGCUUGGCAUUCCGGUACUGUUGGUAAAGCCACC);
5′ UTR-005 (Upstream UTR)
(SEQ ID NO: 91)
(GGGAGAUCAGAGAGAAAAGAAGAGUAAGAAGAAAUAUAAGAGCCACC);
5′ UTR-006 (Upstream UTR) (See WO2016/100812);
5′ UTR-007 (Upstream UTR)
(SEQ ID NO: 92)
(GGGAGACAAGCUUGGCAUUCCGGUACUGUUGGUAAAGCCACC);
5′ UTR-008 (Upstream UTR)
(SEQ ID NO: 93)
(GGGAAUUAACAGAGAAAAGAAGAGUAAGAAGAAAUAUAAGAGCCACC);
5′ UTR-009 (Upstream UTR)
(SEQ ID NO: 94)
(GGGAAAUUAGACAGAAAAGAAGAGUAAGAAGAAAUAUAAGAGCCACC);
5′ UTR-010, Upstream
(SEQ ID NO: 95)
(GGGAAAUAAGAGAGUAAAGAACAGUAAGAAGAAAUAUAAGAGCCACC);
5′ UTR-011 (Upstream UTR)
(SEQ ID NO: 96)
(GGGAAAAAAGAGAGAAAAGAAGACUAAGAAGAAAUAUAAGAGCCACC);
5′ UTR-012 (Upstream UTR)
(SEO ID NO: 97)
(GGGAAAUAAGAGAGAAAAGAAGAGUAAGAAGAUAUAUAAGAGCCACC);
5′ UTR-013 (Upstream UTR)
(SEQ ID NO: 98)
(GGGAAAUAAGAGACAAAACAAGAGUAAGAAGAAAUAUAAGAGCCACC);
5′ UTR-014 (Upstream UTR)
(SEQ ID NO: 99)
(GGGAAAUUAGAGAGUAAAGAACAGUAAGUAGAAUUAAAAGAGCCACC);
5′ UTR-015 (Upstream UTR)
(SEQ ID NO: 100)
(GGGAAAUAAGAGAGAAUAGAAGAGUAAGAAGAAAUAUAAGAGCCACC);
5′ UTR-016 (Upstream UTR)
(SEQ ID NO: 101)
(GGGAAAUAAGAGAGAAAAGAAGAGUAAGAAGAAAAUUAAGAGCCACC);
5′ UTR-017 (Upstream UTR);
or
(SEQ ID NO: 102)
(GGGAAAUAAGAGAGAAAAGAAGAGUAAGAAGAAAUUUAAGAGCCACC);
5′ UTR-018 (Upstream UTR) 5′ UTR
(SEQ ID NO: 88)
(UCAAGCUUUUGGACCCUCGUACAGAAGCUAAUACGACUCACUAUAGGGAA
AUAAGAGAGAAAAGAAGAGUAAGAAGAAAUAUAAGAGC CACC).

[0232] In some embodiments, the 3′ UTR comprises:

142-3p 3′ UTR (UTR including miR142-3p binding site)
(SEQ ID NO: 104)
(UGAUAAUAGUCCAUAAAGUAGGAAACACUACAGCUGGAGCCUCGGUGGCC
AUGCUUCUUGCCCCUUGGGCCUCCCCCCAGCCCCUCCUCCCCUUCCUGCACC
CGUACCCCCGUGGUCUUUGAAUAAAGUCUGAGUGGGCGGC);
142-3p 3′ UTR (UTR including miR142-3p binding site)
(SEQ ID NO: 105)
(UGAUAAUAGGCUGGAGCCUCGGUGGCUCCAUAAAGUAGGAAACACUACAC
AUGCUUCUUGCCCCUUGGGCCUCCCCCCAGCCCCUCCUCCCCUUCCUGCACC
CGUACCCCCGUGGUCUUUGAAUAAAGUCUGAGUGGGCGGC);
or
142-3p 3′ UTR (UTR including miR142-3p binding site)
(SEQ ID NO: 106)
(UGAUAAUAGGCUGGAGCCUCGGUGGCCAUGCUUCUUGCCCCUUCCAUAAA
GUAGGAAACACUACAUGGGCCUCCCCCCAGCCCCUCCUCCCCUUCCUGCAC
CCGUACCCCCGUGGUCUUUGAAUAAAGUCUGAGUGGGCGGC);
142-3p 3′ UTR (UTR including miR142-3p binding site)
(SEQ ID NO: 107)
(UGAUAAUAGGCUGGAGCCUCGGUGGCCAUGCUUCUUGCCCCUUGGGCCUC
CCCCCAGUCCAUAAAGUAGGAAACACUACACCCCUCCUCCCCUUCCUGCAC
CCGUACCCCCGUGGUCUUUGAAUAAAGUCUGAGUGGGCGGC);
142-3p 3′ UTR (UTR including miR142-3p binding site)
(SEQ ID NO: 108)
(UGAUAAUAGGCUGGAGCCUCGGUGGCCAUGCUUCUUGCCCCUUGGGCCUC
CCCCCAGCCCCUCCUCCCCUUCUCCAUAAAGUAGGAAACACUACACUGCAC
CCGUACCCCCGUGGUCUUUGAAUAAAGUCUGAGUGGGCGGC);
142-3p 3′ UTR (UTR including miR142-3p binding site)
(SEQ ID NO: 109)
(UGAUAAUAGGCUGGAGCCUCGGUGGCCAUGCUUCUUGCCCCUUGGGCCUC
CCCCCAGCCCCUCCUCCCCUUCCUGCACCCGUACCCCCUCCAUAAAGUAGGA
AACACUACAGUGGUCUUUGAAUAAAGUCUGAGUGGGCGGC).
142-3p 3′ UTR (UTR including miR142-3p binding site)
(SEQ ID NO: 110)
(UGAUAAUAGGCUGGAGCCUCGGUGGCCAUGCUUCUUGCCCCUUGGGCCUC
CCCCCAGCCCCUCCUCCCCUUCCUGCACCCGUACCCCCGUGGUCUUUGAAUA
AAGUUCCAUAAAGUAGGAAACACUACACUGAGUGGGCGGC);
3′ UTR-018 (See SEQ ID NO: 150);
3′ UTR (miR142 and miR126 binding sites variant 1)
(SEQ ID NO: 111)
(UGAUAAUAGUCCAUAAAGUAGGAAACACUACAGCUGGAGCCUCGGUGGCC
AUGCUUCUUGCCCCUUGGGCCUCCCCCCAGCCCCUCCUCCCCUUCCUGCACC
CGUACCCCCCGCAUUAUUACUCACGGUACGAGUGGUCUUUGAAUAAAGUCU
GAGUGGGCGGC)
3′ UTR (miR142 and miR126 binding sites variant 2)
(SEQ ID NO: 112)
(UGAUAAUAGUCCAUAAAGUAGGAAACACUACAGCUGGAGCCUCGGUGGCC
UAGCUUCUUGCCCCUUGGGCCUCCCCCCAGCCCCUCCUCCCCUUCCUGCACC
CGUACCCCCCGCAUUAUUACUCACGGUACGAGUGGUCUUUGAAUAAAGUCU
GAGUGGGCGGC);
or
3′ UTR (miR142-3p binding site variant 3)
(SEQ ID NO: 4)
UGAUAAUAGGCUGGAGCCUCGGUGGCCUAGCUUCUUGCCCCUUGGGCCUCC
CCCCAGCCCCUCCUCCCCUUCCUGCACCCGUACCCCCUCCAUAAAGUAGGAA
ACACUACAGUGGUCUUUGAAUAAAGUCUGAGUGGGCGGC.

[0233] In certain embodiments, the 5′ UTR and/or 3′ UTR sequence of the invention comprises a nucleotide sequence at least about 60%, at least about 70%, at least about 80%, at least about 90%, at least about 95%, at least about 96%, at least about 97%, at least about 98%, at least about 99%, or about 100% identical to a sequence selected from the group consisting of 5′ UTR sequences comprising any of SEQ ID NOs:3, 88-102, or 165-167 and/or 3′ UTR sequences comprises any of SEQ ID NOs:104-112, 150, 151, or 178, and any combination thereof.

[0234] In certain embodiments, the 5′ UTR and/or 3′ UTR sequence of the invention comprises a nucleotide sequence at least about 60%, at least about 70%, at least about 80%, at least about 90%, at least about 95%, at least about 96%, at least about 97%, at least about 98%, at least about 99%, or about 100% identical to a sequence selected from the group consisting of 5′ UTR sequences comprising any of SEQ ID NO:3, SEQ ID NO:193, SEQ ID NO:39, or SEQ ID NO:194 and/or 3′ UTR sequences comprises any of SEQ ID NO:150, SEQ ID NO:175, SEQ ID NO:195, SEQ ID NO:196, SEQ ID NO:4, SEQ ID NO:177, SEQ ID NO:111, or SEQ ID NO:178, and any combination thereof.

[0235] In some embodiments, the 5′ UTR comprises an amino acid sequence set forth in Table 5B (SEQ ID NO:3, SEQ ID NO:193, SEQ ID NO:39, or SEQ ID NO:194). In some embodiments, the 3′ UTR comprises an amino acid sequence set forth in Table 5B (SEQ ID NO:150, SEQ ID NO:175, SEQ ID NO:195, SEQ ID NO:196, SEQ ID NO:4, SEQ ID NO:177, SEQ ID NO:111, or SEQ ID NO:178). In some embodiments, the 5′ UTR comprises an amino acid sequence set forth in Table 5B (SEQ ID NO:3, SEQ ID NO:193, SEQ ID NO:39, or SEQ ID NO:194) and the 3′ UTR comprises an amino acid sequence set forth in Table 5B (SEQ ID NO:150, SEQ ID NO:175, SEQ ID NO:195, SEQ ID NO:196, SEQ ID NO:4, SEQ ID NO:177, SEQ ID NO:111, or SEQ ID NO:178).

[0236] The polynucleotides of the invention can comprise combinations of features. For example, the ORF can be flanked by a 5′UTR that comprises a strong Kozak translational initiation signal and/or a 3′UTR comprising an oligo(dT) sequence for templated addition of a poly-A tail. A 5′UTR can comprise a first polynucleotide fragment and a second polynucleotide fragment from the same and/or different UTRs (see, e.g., US2010/0293625, herein incorporated by reference in its entirety).

[0237] Other non-UTR sequences can be used as regions or subregions within the polynucleotides of the invention. For example, introns or portions of intron sequences can be incorporated into the polynucleotides of the invention. Incorporation of intronic sequences can increase protein production as well as polynucleotide expression levels. In some embodiments, the polynucleotide of the invention comprises an internal ribosome entry site (IRES) instead of or in addition to a UTR (see, e.g., Yakubov et al., Biochem. Biophys. Res. Commun. 2010 394(1):189-193, the contents of which are incorporated herein by reference in their entirety). In some embodiments, the polynucleotide comprises an IRES instead of a 5′ UTR sequence. In some embodiments, the polynucleotide comprises an ORF and a viral capsid sequence. In some embodiments, the polynucleotide comprises a synthetic 5′ UTR in combination with a non-synthetic 3′ UTR.

[0238] In some embodiments, the UTR can also include at least one translation enhancer polynucleotide, translation enhancer element, or translational enhancer elements (collectively, “TEE,” which refers to nucleic acid sequences that increase the amount of polypeptide or protein produced from a polynucleotide. As a non-limiting example, the TEE can be located between the transcription promoter and the start codon. In some embodiments, the 5′ UTR comprises a TEE.

[0239] In one aspect, a TEE is a conserved element in a UTR that can promote translational activity of a nucleic acid such as, but not limited to, cap-dependent or cap-independent translation.

### 11. MICRORNA (MIRNA) BINDING SITES

[0240] Polynucleotides of the invention can include regulatory elements, for example, microRNA (miRNA) binding sites, transcription factor binding sites, structured mRNA sequences and/or motifs, artificial binding sites engineered to act as pseudo-receptors for endogenous nucleic acid binding molecules, and combinations thereof. In some embodiments, polynucleotides including such regulatory elements are referred to as including “sensor sequences”.

[0241] In some embodiments, a polynucleotide (e.g., a ribonucleic acid (RNA), e.g., a messenger RNA (mRNA)) of the invention comprises an open reading frame (ORF) encoding a polypeptide of interest and further comprises one or more miRNA binding site(s). Inclusion or incorporation of miRNA binding site(s) provides for regulation of polynucleotides of the invention, and in turn, of the polypeptides encoded therefrom, based on tissue-specific and/or cell-type specific expression of naturally-occurring miRNAs.

[0242] The present invention also provides pharmaceutical compositions and formulations that comprise any of the polynucleotides described above. In some embodiments, the composition or formulation further comprises a delivery agent.

[0243] In some embodiments, the composition or formulation can contain a polynucleotide comprising a sequence optimized nucleic acid sequence disclosed herein which encodes a polypeptide. In some embodiments, the composition or formulation can contain a polynucleotide (e.g., a RNA, e.g., an mRNA) comprising a polynucleotide (e.g., an ORF) having significant sequence identity to a sequence optimized nucleic acid sequence disclosed herein which encodes a polypeptide. In some embodiments, the polynucleotide further comprises a miRNA binding site, e.g., a miRNA binding site that binds

[0244] A miRNA, e.g., a natural-occurring miRNA, is a 19-25 nucleotide long noncoding RNA that binds to a polynucleotide and down-regulates gene expression either by reducing stability or by inhibiting translation of the polynucleotide. A miRNA sequence comprises a “seed” region, i.e., a sequence in the region of positions 2-8 of the mature miRNA. A miRNA seed can comprise positions 2-8 or 2-7 of the mature miRNA.

[0245] microRNAs derive enzymatically from regions of RNA transcripts that fold back on themselves to form short hairpin structures often termed a pre-miRNA (precursor-miRNA). A pre-miRNA typically has a two-nucleotide overhang at its 3′ end, and has 3′ hydroxyl and 5′ phosphate groups. This precursor-mRNA is processed in the nucleus and subsequently transported to the cytoplasm where it is further processed by DICER (a RNase III enzyme), to form a mature microRNA of approximately 22 nucleotides. The mature microRNA is then incorporated into a ribonuclear particle to form the RNA-induced silencing complex, RISC, which mediates gene silencing. Art-recognized nomenclature for mature miRNAs typically designates the arm of the pre-miRNA from which the mature miRNA derives; “5p” means the microRNA is from the 5 prime arm of the pre-miRNA hairpin and “3p” means the microRNA is from the 3 prime end of the pre-miRNA hairpin. A miR referred to by number herein can refer to either of the two mature microRNAs originating from opposite arms of the same pre-miRNA (e.g., either the 3p or 5p microRNA). All miRs referred to herein are intended to include both the 3p and 5p arms/sequences, unless particularly specified by the 3p or 5p designation.

[0246] As used herein, the term “microRNA (miRNA or miR) binding site” refers to a sequence within a polynucleotide, e.g., within a DNA or within an RNA transcript, including in the 5′UTR and/or 3′UTR, that has sufficient complementarity to all or a region of a miRNA to interact with, associate with or bind to the miRNA. In some embodiments, a polynucleotide of the invention comprising an ORF encoding a polypeptide of interest and further comprises one or more miRNA binding site(s). In exemplary embodiments, a 5′ UTR and/or 3′ UTR of the polynucleotide (e.g., a ribonucleic acid (RNA), e.g., a messenger RNA (mRNA)) comprises the one or more miRNA binding site(s).

[0247] A miRNA binding site having sufficient complementarity to a miRNA refers to a degree of complementarity sufficient to facilitate miRNA-mediated regulation of a polynucleotide, e.g., miRNA-mediated translational repression or degradation of the polynucleotide. In exemplary aspects of the invention, a miRNA binding site having sufficient complementarity to the miRNA refers to a degree of complementarity sufficient to facilitate miRNA-mediated degradation of the polynucleotide, e.g., miRNA-guided RNA-induced silencing complex (RISC)-mediated cleavage of mRNA. The miRNA binding site can have complementarity to, for example, a 19-25 nucleotide long miRNA sequence, to a 19-23 nucleotide long miRNA sequence, or to a 22 nucleotide long miRNA sequence. A miRNA binding site can be complementary to only a portion of a miRNA, e.g., to a portion less than 1, 2, 3, or 4 nucleotides of the full length of a naturally-occurring miRNA sequence, or to a portion less than 1, 2, 3, or 4 nucleotides shorter than a naturally-occurring miRNA sequence. Full or complete complementarity (e.g., full complementarity or complete complementarity over all or a significant portion of the length of a naturally-occurring miRNA) is preferred when the desired regulation is mRNA degradation.

[0248] In some embodiments, a miRNA binding site includes a sequence that has complementarity (e.g., partial or complete complementarity) with an miRNA seed sequence. In some embodiments, the miRNA binding site includes a sequence that has complete complementarity with a miRNA seed sequence. In some embodiments, a miRNA binding site includes a sequence that has complementarity (e.g., partial or complete complementarity) with an miRNA sequence. In some embodiments, the miRNA binding site includes a sequence that has complete complementarity with a miRNA sequence. In some embodiments, a miRNA binding site has complete complementarity with a miRNA sequence but for 1, 2, or 3 nucleotide substitutions, terminal additions, and/or truncations.

[0249] In some embodiments, the miRNA binding site is the same length as the corresponding miRNA. In other embodiments, the miRNA binding site is one, two, three, four, five, six, seven, eight, nine, ten, eleven or twelve nucleotide(s) shorter than the corresponding miRNA at the 5′ terminus, the 3′ terminus, or both. In still other embodiments, the microRNA binding site is two nucleotides shorter than the corresponding microRNA at the 5′ terminus, the 3′ terminus, or both. The miRNA binding sites that are shorter than the corresponding miRNAs are still capable of degrading the mRNA incorporating one or more of the miRNA binding sites or preventing the mRNA from translation.

[0250] In some embodiments, the miRNA binding site binds the corresponding mature miRNA that is part of an active RISC containing Dicer. In another embodiment, binding of the miRNA binding site to the corresponding miRNA in RISC degrades the mRNA containing the miRNA binding site or prevents the mRNA from being translated. In some embodiments, the miRNA binding site has sufficient complementarity to miRNA so that a RISC complex comprising the miRNA cleaves the polynucleotide comprising the miRNA binding site. In other embodiments, the miRNA binding site has imperfect complementarity so that a RISC complex comprising the miRNA induces instability in the polynucleotide comprising the miRNA binding site. In another embodiment, the miRNA binding site has imperfect complementarity so that a RISC complex comprising the miRNA represses transcription of the polynucleotide comprising the miRNA binding site.

[0251] In some embodiments, the miRNA binding site has one, two, three, four, five, six, seven, eight, nine, ten, eleven or twelve mismatch(es) from the corresponding miRNA.

[0252] In some embodiments, the miRNA binding site has at least about ten, at least about eleven, at least about twelve, at least about thirteen, at least about fourteen, at least about fifteen, at least about sixteen, at least about seventeen, at least about eighteen, at least about nineteen, at least about twenty, or at least about twenty-one contiguous nucleotides complementary to at least about ten, at least about eleven, at least about twelve, at least about thirteen, at least about fourteen, at least about fifteen, at least about sixteen, at least about seventeen, at least about eighteen, at least about nineteen, at least about twenty, or at least about twenty-one, respectively, contiguous nucleotides of the corresponding miRNA.

[0253] By engineering one or more miRNA binding sites into a polynucleotide of the invention, the polynucleotide can be targeted for degradation or reduced translation, provided the miRNA in question is available. This can reduce off-target effects upon delivery of the polynucleotide. For example, if a polynucleotide of the invention is not intended to be delivered to a tissue or cell but ends up is said tissue or cell, then a miRNA abundant in the tissue or cell can inhibit the expression of the gene of interest if one or multiple binding sites of the miRNA are engineered into the 5′ UTR and/or 3′ UTR of the polynucleotide. Thus, in some embodiments, incorporation of one or more miRNA binding sites into an mRNA of the disclosure may reduce the hazard of off-target effects upon nucleic acid molecule delivery and/or enable tissue-specific regulation of expression of a polypeptide encoded by the mRNA. In yet other embodiments, incorporation of one or more miRNA binding sites into an mRNA of the disclosure can modulate immune responses upon nucleic acid delivery in vivo. In further embodiments, incorporation of one or more miRNA binding sites into an mRNA of the disclosure can modulate accelerated blood clearance (ABC) of lipid-comprising compounds and compositions described herein.

[0254] Conversely, miRNA binding sites can be removed from polynucleotide sequences in which they naturally occur in order to increase protein expression in specific tissues. For example, a binding site for a specific miRNA can be removed from a polynucleotide to improve protein expression in tissues or cells containing the miRNA.

[0255] Regulation of expression in multiple tissues can be accomplished through introduction or removal of one or more miRNA binding sites, e.g., one or more distinct miRNA binding sites. The decision whether to remove or insert a miRNA binding site can be made based on miRNA expression patterns and/or their profilings in tissues and/or cells in development and/or disease. Identification of miRNAs, miRNA binding sites, and their expression patterns and role in biology have been reported (e.g., Bonauer et al., Curr Drug Targets 2010 11:943-949; Anand and Cheresh Curr Opin Hematol 2011 18:171-176; Contreras and Rao Leukemia 2012 26:404-413 (2011 Dec. 20. doi: 10.1038/leu.2011.356); Bartel Cell 2009 136:215-233; Landgraf et al, Cell, 2007 129:1401-1414; Gentner and Naldini, Tissue Antigens. 2012 80:393-403 and all references therein; each of which is incorporated herein by reference in its entirety).

[0256] Examples of tissues where miRNA are known to regulate mRNA, and thereby protein expression, include, but are not limited to, liver (miR-122), muscle (miR-133, miR-206, miR-208), endothelial cells (miR-17-92, miR-126), myeloid cells (miR-142-3p, miR-142-5p, miR-16, miR-21, miR-223, miR-24, miR-27), adipose tissue (let-7, miR-30c), heart (miR-id, miR-149), kidney (miR-192, miR-194, miR-204), and lung epithelial cells (let-7, miR-133, miR-126).

[0257] Specifically, miRNAs are known to be differentially expressed in immune cells (also called hematopoietic cells), such as antigen presenting cells (APCs) (e.g., dendritic cells and macrophages), macrophages, monocytes, B lymphocytes, T lymphocytes, granulocytes, natural killer cells, etc. Immune cell specific miRNAs are involved in immunogenicity, autoimmunity, the immune-response to infection, inflammation, as well as unwanted immune response after gene therapy and tissue/organ transplantation. Immune cells specific miRNAs also regulate many aspects of development, proliferation, differentiation and apoptosis of hematopoietic cells (immune cells). For example, miR-142 and miR-146 are exclusively expressed in immune cells, particularly abundant in myeloid dendritic cells. It has been demonstrated that the immune response to a polynucleotide can be shut-off by adding miR-142 binding sites to the 3′-UTR of the polynucleotide, enabling more stable gene transfer in tissues and cells. miR-142 efficiently degrades exogenous polynucleotides in antigen presenting cells and suppresses cytotoxic elimination of transduced cells (e.g., Annoni A et al., blood, 2009, 114, 5152-5161; Brown B D, et al., Nat med. 2006, 12(5), 585-591; Brown B D, et al., blood, 2007, 110(13): 4144-4152, each of which is incorporated herein by reference in its entirety).

[0258] An antigen-mediated immune response can refer to an immune response triggered by foreign antigens, which, when entering an organism, are processed by the antigen presenting cells and displayed on the surface of the antigen presenting cells. T cells can recognize the presented antigen and induce a cytotoxic elimination of cells that express the antigen.

[0259] Introducing a miR-142 binding site into the 5′ UTR and/or 3′UTR of a polynucleotide of the invention can selectively repress gene expression in antigen presenting cells through miR-142 mediated degradation, limiting antigen presentation in antigen presenting cells (e.g., dendritic cells) and thereby preventing antigen-mediated immune response after the delivery of the polynucleotide. The polynucleotide is then stably expressed in target tissues or cells without triggering cytotoxic elimination.

[0260] In one embodiment, binding sites for miRNAs that are known to be expressed in immune cells, in particular, antigen presenting cells, can be engineered into a polynucleotide of the invention to suppress the expression of the polynucleotide in antigen presenting cells through miRNA mediated RNA degradation, subduing the antigen-mediated immune response. Expression of the polynucleotide is maintained in non-immune cells where the immune cell specific miRNAs are not expressed. For example, in some embodiments, to prevent an immunogenic reaction against a liver specific protein, any miR-122 binding site can be removed and a miR-142 (and/or mirR-146) binding site can be engineered into the 5′ UTR and/or 3′ UTR of a polynucleotide of the invention.

[0261] To further drive the selective degradation and suppression in APCs and macrophage, a polynucleotide of the invention can include a further negative regulatory element in the 5′ UTR and/or 3′ UTR, either alone or in combination with miR-142 and/or miR-146 binding sites. As a non-limiting example, the further negative regulatory element is a Constitutive Decay Element (CDE).

[0262] Immune cell specific miRNAs include, but are not limited to, hsa-let-7a-2-3p, hsa-let-7a-3p, hsa-7a-5p, hsa-let-7c, hsa-let-7e-3p, hsa-let-7e-5p, hsa-let-7g-3p, hsa-let-7g-5p, hsa-let-7i-3p, hsa-let-7i-5p, miR-10a-3p, miR-10a-5p, miR-1184, hsa-let-7f-1-3p, hsa-let-7f-2-5p, hsa-let-7f-5p, miR-125b-1-3p, miR-125b-2-3p, miR-125b-5p, miR-1279, miR-130a-3p, miR-130a-5p, miR-132-3p, miR-132-5p, miR-142-3p, miR-142-5p, miR-143-3p, miR-143-5p, miR-146a-3p, miR-146a-5p, miR-146b-3p, miR-146b-5p, miR-147a, miR-147b, miR-148a-5p, miR-148a-3p, miR-150-3p, miR-150-5p, miR-151b, miR-155-3p, miR-155-5p, miR-15a-3p, miR-15a-5p, miR-15b-5p, miR-15b-3p, miR-16-1-3p, miR-16-2-3p, miR-16-5p, miR-17-5p, miR-181a-3p, miR-181a-5p, miR-181a-2-3p, miR-182-3p, miR-182-5p, miR-197-3p, miR-197-5p, miR-21-5p, miR-21-3p, miR-214-3p, miR-214-5p, miR-223-3p, miR-223-5p, miR-221-3p, miR-221-5p, miR-23b-3p, miR-23b-5p, miR-24-1-5p, miR-24-2-5p, miR-24-3p, miR-26a-1-3p, miR-26a-2-3p, miR-26a-5p, miR-26b-3p, miR-26b-5p, miR-27a-3p, miR-27a-5p, miR-27b-3p, miR-27b-5p, miR-28-3p, miR-28-5p, miR-2909, miR-29a-3p, miR-29a-5p, miR-29b-1-5p, miR-29b-2-5p, miR-29c-3p, miR-29c-5p, miR-30e-3p, miR-30e-5p, miR-331-5p, miR-339-3p, miR-339-5p, miR-345-3p, miR-345-5p, miR-346, miR-34a-3p, miR-34a-5p, miR-363-3p, miR-363-5p, miR-372, miR-377-3p, miR-377-5p, miR-493-3p, miR-493-5p, miR-542, miR-548b-5p, miR548c-5p, miR-548i, miR-548j, miR-548n, miR-574-3p, miR-598, miR-718, miR-935, miR-99a-3p, miR-99a-5p, miR-99b-3p, and miR-99b-5p. Furthermore, novel miRNAs can be identified in immune cell through micro-array hybridization and microtome analysis (e.g., Jima D D et al, Blood, 2010, 116:e118-e127; Vaz C et al., BMC Genomics, 2010, 11, 288, the content of each of which is incorporated herein by reference in its entirety.)

[0263] miRNAs that are known to be expressed in the liver include, but are not limited to, miR-107, miR-122-3p, miR-122-5p, miR-1228-3p, miR-1228-5p, miR-1249, miR-129-5p, miR-1303, miR-151a-3p, miR-151a-5p, miR-152, miR-194-3p, miR-194-5p, miR-199a-3p, miR-199a-5p, miR-199b-3p, miR-199b-5p, miR-296-5p, miR-557, miR-581, miR-939-3p, and miR-939-5p. miRNA binding sites from any liver specific miRNA can be introduced to or removed from a polynucleotide of the invention to regulate expression of the polynucleotide in the liver. Liver specific miRNA binding sites can be engineered alone or further in combination with immune cell (e.g., APC) miRNA binding sites in a polynucleotide of the invention.

[0264] miRNAs that are known to be expressed in the lung include, but are not limited to, let-7a-2-3p, let-7a-3p, let-7a-5p, miR-126-3p, miR-126-5p, miR-127-3p, miR-127-5p, miR-130a-3p, miR-130a-5p, miR-130b-3p, miR-130b-5p, miR-133a, miR-133b, miR-134, miR-18a-3p, miR-18a-5p, miR-18b-3p, miR-18b-5p, miR-24-1-5p, miR-24-2-5p, miR-24-3p, miR-296-3p, miR-296-5p, miR-32-3p, miR-337-3p, miR-337-5p, miR-381-3p, and miR-381-5p. miRNA binding sites from any lung specific miRNA can be introduced to or removed from a polynucleotide of the invention to regulate expression of the polynucleotide in the lung. Lung specific miRNA binding sites can be engineered alone or further in combination with immune cell (e.g., APC) miRNA binding sites in a polynucleotide of the invention.

[0265] miRNAs that are known to be expressed in the heart include, but are not limited to, miR-1, miR-133a, miR-133b, miR-149-3p, miR-149-5p, miR-186-3p, miR-186-5p, miR-208a, miR-208b, miR-210, miR-296-3p, miR-320, miR-451a, miR-451b, miR-499a-3p, miR-499a-5p, miR-499b-3p, miR-499b-5p, miR-744-3p, miR-744-5p, miR-92b-3p, and miR-92b-5p. miRNA binding sites from any heart specific microRNA can be introduced to or removed from a polynucleotide of the invention to regulate expression of the polynucleotide in the heart. Heart specific miRNA binding sites can be engineered alone or further in combination with immune cell (e.g., APC) miRNA binding sites in a polynucleotide of the invention.

[0266] miRNAs that are known to be expressed in the nervous system include, but are not limited to, miR-124-5p, miR-125a-3p, miR-125a-5p, miR-125b-1-3p, miR-125b-2-3p, miR-125b-5p, miR-1271-3p, miR-1271-5p, miR-128, miR-132-5p, miR-135a-3p, miR-135a-5p, miR-135b-3p, miR-135b-5p, miR-137, miR-139-5p, miR-139-3p, miR-149-3p, miR-149-5p, miR-153, miR-181c-3p, miR-181c-5p, miR-183-3p, miR-183-5p, miR-190a, miR-190b, miR-212-3p, miR-212-5p, miR-219-1-3p, miR-219-2-3p, miR-23a-3p, miR-23a-5p, miR-30a-5p, miR-30b-3p, miR-30b-5p, miR-30c-1-3p, miR-30c-2-3p, miR-30c-5p, miR-30d-3p, miR-30d-5p, miR-329, miR-342-3p, miR-3665, miR-3666, miR-380-3p, miR-380-5p, miR-383, miR-410, miR-425-3p, miR-425-5p, miR-454-3p, miR-454-5p, miR-483, miR-510, miR-516a-3p, miR-548b-5p, miR-548c-5p, miR-571, miR-7-1-3p, miR-7-2-3p, miR-7-5p, miR-802, miR-922, miR-9-3p, and miR-9-5p. miRNAs enriched in the nervous system further include those specifically expressed in neurons, including, but not limited to, miR-132-3p, miR-132-3p, miR-148b-3p, miR-148b-5p, miR-151a-3p, miR-151a-5p, miR-212-3p, miR-212-5p, miR-320b, miR-320e, miR-323a-3p, miR-323a-5p, miR-324-5p, miR-325, miR-326, miR-328, miR-922 and those specifically expressed in glial cells, including, but not limited to, miR-1250, miR-219-1-3p, miR-219-2-3p, miR-219-5p, miR-23a-3p, miR-23a-5p, miR-3065-3p, miR-3065-5p, miR-30e-3p, miR-30e-5p, miR-32-5p, miR-338-5p, and miR-657. miRNA binding sites from any CNS specific miRNA can be introduced to or removed from a polynucleotide of the invention to regulate expression of the polynucleotide in the nervous system. Nervous system specific miRNA binding sites can be engineered alone or further in combination with immune cell (e.g., APC) miRNA binding sites in a polynucleotide of the invention.

[0267] miRNAs that are known to be expressed in the pancreas include, but are not limited to, miR-105-3p, miR-105-5p, miR-184, miR-195-3p, miR-195-5p, miR-196a-3p, miR-196a-5p, miR-214-3p, miR-214-5p, miR-216a-3p, miR-216a-5p, miR-30a-3p, miR-33a-3p, miR-33a-5p, miR-375, miR-7-1-3p, miR-7-2-3p, miR-493-3p, miR-493-5p, and miR-944. miRNA binding sites from any pancreas specific miRNA can be introduced to or removed from a polynucleotide of the invention to regulate expression of the polynucleotide in the pancreas. Pancreas specific miRNA binding sites can be engineered alone or further in combination with immune cell (e.g. APC) miRNA binding sites in a polynucleotide of the invention.

[0268] miRNAs that are known to be expressed in the kidney include, but are not limited to, miR-122-3p, miR-145-5p, miR-17-5p, miR-192-3p, miR-192-5p, miR-194-3p, miR-194-5p, miR-20a-3p, miR-20a-5p, miR-204-3p, miR-204-5p, miR-210, miR-216a-3p, miR-216a-5p, miR-296-3p, miR-30a-3p, miR-30a-5p, miR-30b-3p, miR-30b-5p, miR-30c-1-3p, miR-30c-2-3p, miR30c-5p, miR-324-3p, miR-335-3p, miR-335-5p, miR-363-3p, miR-363-5p, and miR-562. miRNA binding sites from any kidney specific miRNA can be introduced to or removed from a polynucleotide of the invention to regulate expression of the polynucleotide in the kidney. Kidney specific miRNA binding sites can be engineered alone or further in combination with immune cell (e.g., APC) miRNA binding sites in a polynucleotide of the invention.

[0269] miRNAs that are known to be expressed in the muscle include, but are not limited to, let-7g-3p, let-7g-5p, miR-1, miR-1286, miR-133a, miR-133b, miR-140-3p, miR-143-3p, miR-143-5p, miR-145-3p, miR-145-5p, miR-188-3p, miR-188-5p, miR-206, miR-208a, miR-208b, miR-25-3p, and miR-25-5p. MiRNA binding sites from any muscle specific miRNA can be introduced to or removed from a polynucleotide of the invention to regulate expression of the polynucleotide in the muscle. Muscle specific miRNA binding sites can be engineered alone or further in combination with immune cell (e.g., APC) miRNA binding sites in a polynucleotide of the invention.

[0270] miRNAs are also differentially expressed in different types of cells, such as, but not limited to, endothelial cells, epithelial cells, and adipocytes.

[0271] miRNAs that are known to be expressed in endothelial cells include, but are not limited to, let-7b-3p, let-7b-5p, miR-100-3p, miR-100-5p, miR-101-3p, miR-101-5p, miR-126-3p, miR-126-5p, miR-1236-3p, miR-1236-5p, miR-130a-3p, miR-130a-5p, miR-17-5p, miR-17-3p, miR-18a-3p, miR-18a-5p, miR-19a-3p, miR-19a-5p, miR-19b-1-5p, miR-19b-2-5p, miR-19b-3p, miR-20a-3p, miR-20a-5p, miR-217, miR-210, miR-21-3p, miR-21-5p, miR-221-3p, miR-221-5p, miR-222-3p, miR-222-5p, miR-23a-3p, miR-23a-5p, miR-296-5p, miR-361-3p, miR-361-5p, miR-421, miR-424-3p, miR-424-5p, miR-513a-5p, miR-92a-1-5p, miR-92a-2-5p, miR-92a-3p, miR-92b-3p, and miR-92b-5p. Many novel miRNAs are discovered in endothelial cells from deep-sequencing analysis (e.g., Voellenkle C et al., RNA, 2012, 18, 472-484, herein incorporated by reference in its entirety). miRNA binding sites from any endothelial cell specific miRNA can be introduced to or removed from a polynucleotide of the invention to regulate expression of the polynucleotide in the endothelial cells.

[0272] miRNAs that are known to be expressed in epithelial cells include, but are not limited to, let-7b-3p, let-7b-5p, miR-1246, miR-200a-3p, miR-200a-5p, miR-200b-3p, miR-200b-5p, miR-200c-3p, miR-200c-5p, miR-338-3p, miR-429, miR-451a, miR-451b, miR-494, miR-802 and miR-34a, miR-34b-5p, miR-34c-5p, miR-449a, miR-449b-3p, miR-449b-5p specific in respiratory ciliated epithelial cells, let-7 family, miR-133a, miR-133b, miR-126 specific in lung epithelial cells, miR-382-3p, miR-382-5p specific in renal epithelial cells, and miR-762 specific in corneal epithelial cells. miRNA binding sites from any epithelial cell specific miRNA can be introduced to or removed from a polynucleotide of the invention to regulate expression of the polynucleotide in the epithelial cells.

[0273] In addition, a large group of miRNAs are enriched in embryonic stem cells, controlling stem cell self-renewal as well as the development and/or differentiation of various cell lineages, such as neural cells, cardiac, hematopoietic cells, skin cells, osteogenic cells and muscle cells (e.g., Kuppusamy K T et al., Curr. Mol Med, 2013, 13(5), 757-764; Vidigal J A and Ventura A, Semin Cancer Biol. 2012, 22(5-6), 428-436; Goff L A et al., PLoS One, 2009, 4:e7192; Morin R D et al., Genome Res, 2008, 18, 610-621; Yoo J K et al., Stem Cells Dev. 2012, 21(11), 2049-2057, each of which is herein incorporated by reference in its entirety). miRNAs abundant in embryonic stem cells include, but are not limited to, let-7a-2-3p, let-a-3p, let-7a-5p, let7d-3p, let-7d-5p, miR-103a-2-3p, miR-103a-5p, miR-106b-3p, miR-106b-5p, miR-1246, miR-1275, miR-138-1-3p, miR-138-2-3p, miR-138-5p, miR-154-3p, miR-154-5p, miR-200c-3p, miR-200c-5p, miR-290, miR-301a-3p, miR-301a-5p, miR-302a-3p, miR-302a-5p, miR-302b-3p, miR-302b-5p, miR-302c-3p, miR-302c-5p, miR-302d-3p, miR-302d-5p, miR-302e, miR-367-3p, miR-367-5p, miR-369-3p, miR-369-5p, miR-370, miR-371, miR-373, miR-380-5p, miR-423-3p, miR-423-5p, miR-486-5p, miR-520c-3p, miR-548e, miR-548f, miR-548g-3p, miR-548g-5p, miR-548i, miR-548k, miR-548l, miR-548m, miR-548n, miR-5480-3p, miR-5480-5p, miR-548p, miR-664a-3p, miR-664a-5p, miR-664b-3p, miR-664b-5p, miR-766-3p, miR-766-5p, miR-885-3p, miR-885-5p, miR-93-3p, miR-93-5p, miR-941, miR-96-3p, miR-96-5p, miR-99b-3p and miR-99b-5p. Many predicted novel miRNAs are discovered by deep sequencing in human embryonic stem cells (e.g., Morin R D et al., Genome Res, 2008, 18, 610-621; Goff L A et al., PLoS One, 2009, 4:e7192; Bar M et al., Stem cells, 2008, 26, 2496-2505, the content of each of which is incorporated herein by reference in its entirety).

[0274] In some embodiments, miRNAs are selected based on expression and abundance in immune cells of the hematopoietic lineage, such as B cells, T cells, macrophages, dendritic cells, and cells that are known to express TLR7/TLR8 and/or able to secrete cytokines such as endothelial cells and platelets. In some embodiments, the miRNA set thus includes miRs that may be responsible in part for the immunogenicity of these cells, and such that a corresponding miR-site incorporation in polynucleotides of the present invention (e.g., mRNAs) could lead to destabilization of the mRNA and/or suppression of translation from these mRNAs in the specific cell type. Non-limiting representative examples include miR-142, miR-144, miR-150, miR-155 and miR-223, which are specific for many of the hematopoietic cells; miR-142, miR150, miR-16 and miR-223, which are expressed in B cells; miR-223, miR-451, miR-26a, miR-16, which are expressed in progenitor hematopoietic cells; and miR-126, which is expressed in plasmacytoid dendritic cells, platelets and endothelial cells. For further discussion of tissue expression of miRs see e.g., Teruel-Montoya, R. et al. (2014) PLoS One 9:e102259; Landgraf, P. et al. (2007) Cell 129:1401-1414; Bissels, U. et al. (2009) RNA 15:2375-2384. Any one miR-site incorporation in the 3′ UTR and/or 5′ UTR may mediate such effects in multiple cell types of interest (e.g., miR-142 is abundant in both B cells and dendritic cells).

[0275] In some embodiments, it may be beneficial to target the same cell type with multiple miRs and to incorporate binding sites to each of the 3p and 5p arm if both are abundant (e.g., both miR-142-3p and miR142-5p are abundant in hematopoietic stem cells). Thus, in certain embodiments, polynucleotides of the invention contain two or more (e.g., two, three, four or more) miR bindings sites from: (i) the group consisting of miR-142, miR-144, miR-150, miR-155 and miR-223 (which are expressed in many hematopoietic cells); or (ii) the group consisting of miR-142, miR150, miR-16 and miR-223 (which are expressed in B cells); or the group consisting of miR-223, miR-451, miR-26a, miR-16 (which are expressed in progenitor hematopoietic cells).

[0276] In some embodiments, it may also be beneficial to combine various miRs such that multiple cell types of interest are targeted at the same time (e.g., miR-142 and miR-126 to target many cells of the hematopoietic lineage and endothelial cells). Thus, for example, in certain embodiments, polynucleotides of the invention comprise two or more (e.g., two, three, four or more) miRNA bindings sites, wherein: (i) at least one of the miRs targets cells of the hematopoietic lineage (e.g., miR-142, miR-144, miR-150, miR-155 or miR-223) and at least one of the miRs targets plasmacytoid dendritic cells, platelets or endothelial cells (e.g., miR-126); or (ii) at least one of the miRs targets B cells (e.g., miR-142, miR150, miR-16 or miR-223) and at least one of the miRs targets plasmacytoid dendritic cells, platelets or endothelial cells (e.g., miR-126); or (iii) at least one of the miRs targets progenitor hematopoietic cells (e.g., miR-223, miR-451, miR-26a or miR-16) and at least one of the miRs targets plasmacytoid dendritic cells, platelets or endothelial cells (e.g., miR-126); or (iv) at least one of the miRs targets cells of the hematopoietic lineage (e.g., miR-142, miR-144, miR-150, miR-155 or miR-223), at least one of the miRs targets B cells (e.g., miR-142, miR150, miR-16 or miR-223) and at least one of the miRs targets plasmacytoid dendritic cells, platelets or endothelial cells (e.g., miR-126); or any other possible combination of the foregoing four classes of miR binding sites (i.e., those targeting the hematopoietic lineage, those targeting B cells, those targeting progenitor hematopoietic cells and/or those targeting plasmacytoid dendritic cells/platelets/endothelial cells).

[0277] In one embodiment, to modulate immune responses, polynucleotides of the present invention can comprise one or more miRNA binding sequences that bind to one or more miRs that are expressed in conventional immune cells or any cell that expresses TLR7 and/or TLR8 and secrete pro-inflammatory cytokines and/or chemokines (e.g., in immune cells of peripheral lymphoid organs and/or splenocytes and/or endothelial cells). It has now been discovered that incorporation into an mRNA of one or more miRs that are expressed in conventional immune cells or any cell that expresses TLR7 and/or TLR8 and secrete pro-inflammatory cytokines and/or chemokines (e.g., in immune cells of peripheral lymphoid organs and/or splenocytes and/or endothelial cells) reduces or inhibits immune cell activation (e.g., B cell activation, as measured by frequency of activated B cells) and/or cytokine production (e.g., production of IL-6, IFN-γ and/or TNFα). Furthermore, it has now been discovered that incorporation into an mRNA of one or more miRs that are expressed in conventional immune cells or any cell that expresses TLR7 and/or TLR8 and secrete pro-inflammatory cytokines and/or chemokines (e.g., in immune cells of peripheral lymphoid organs and/or splenocytes and/or endothelial cells) can reduce or inhibit an anti-drug antibody (ADA) response against a protein of interest encoded by the mRNA.

[0278] In another embodiment, to modulate accelerated blood clearance of a polynucleotide delivered in a lipid-comprising compound or composition, polynucleotides of the invention can comprise one or more miR binding sequences that bind to one or more miRNAs expressed in conventional immune cells or any cell that expresses TLR7 and/or TLR8 and secrete pro-inflammatory cytokines and/or chemokines (e.g., in immune cells of peripheral lymphoid organs and/or splenocytes and/or endothelial cells). It has now been discovered that incorporation into an mRNA of one or more miR binding sites reduces or inhibits accelerated blood clearance (ABC) of the lipid-comprising compound or composition for use in delivering the mRNA. Furthermore, it has now been discovered that incorporation of one or more miR binding sites into an mRNA reduces serum levels of anti-PEG anti-IgM (e.g., reduces or inhibits the acute production of IgMs that recognize polyethylene glycol (PEG) by B cells) and/or reduces or inhibits proliferation and/or activation of plasmacytoid dendritic cells following administration of a lipid-comprising compound or composition comprising the mRNA.

[0279] In some embodiments, miR sequences may correspond to any known microRNA expressed in immune cells, including but not limited to those taught in US Publication US2005/0261218 and US Publication US2005/0059005, the contents of which are incorporated herein by reference in their entirety. Non-limiting examples of miRs expressed in immune cells include those expressed in spleen cells, myeloid cells, dendritic cells, plasmacytoid dendritic cells, B cells, T cells and/or macrophages. For example, miR-142-3p, miR-142-5p, miR-16, miR-21, miR-223, miR-24 and miR-27 are expressed in myeloid cells, miR-155 is expressed in dendritic cells, B cells and T cells, miR-146 is upregulated in macrophages upon TLR stimulation and miR-126 is expressed in plasmacytoid dendritic cells. In certain embodiments, the miR(s) is expressed abundantly or preferentially in immune cells. For example, miR-142 (miR-142-3p and/or miR-142-5p), miR-126 (miR-126-3p and/or miR-126-5p), miR-146 (miR-146-3p and/or miR-146-5p) and miR-155 (miR-155-3p and/or miR155-5p) are expressed abundantly in immune cells. These microRNA sequences are known in the art and, thus, one of ordinary skill in the art can readily design binding sequences or target sequences to which these microRNAs will bind based upon Watson-Crick complementarity.

[0280] Accordingly, in various embodiments, polynucleotides of the present invention comprise at least one microRNA binding site for a miR selected from the group consisting of miR-142, miR-146, miR-155, miR-126, miR-16, miR-21, miR-223, miR-24 and miR-27. In another embodiment, the mRNA comprises at least two miR binding sites for microRNAs expressed in immune cells. In various embodiments, the polynucleotide of the invention comprises 1-4, one, two, three or four miR binding sites for microRNAs expressed in immune cells. In another embodiment, the polynucleotide of the invention comprises three miR binding sites. These miR binding sites can be for microRNAs selected from the group consisting of miR-142, miR-146, miR-155, miR-126, miR-16, miR-21, miR-223, miR-24, miR-27, and combinations thereof. In one embodiment, the polynucleotide of the invention comprises two or more (e.g., two, three, four) copies of the same miR binding site expressed in immune cells, e.g., two or more copies of a miR binding site selected from the group of miRs consisting of miR-142, miR-146, miR-155, miR-126, miR-16, miR-21, miR-223, miR-24, miR-27.

[0281] In one embodiment, the polynucleotide of the invention comprises three copies of the same miRNA binding site. In certain embodiments, use of three copies of the same miR binding site can exhibit beneficial properties as compared to use of a single miRNA binding site. Non-limiting examples of sequences for 3′ UTRs containing three miRNA bindings sites are shown in SEQ ID NO:155 (three miR-142-3p binding sites) and SEQ ID NO:157 (three miR-142-5p binding sites).

[0282] In another embodiment, the polynucleotide of the invention comprises two or more (e.g., two, three, four) copies of at least two different miR binding sites expressed in immune cells. Non-limiting examples of sequences of 3′ UTRs containing two or more different miR binding sites are shown in SEQ ID NO:152 (one miR-142-3p binding site and one miR-126-3p binding site), SEQ ID NO:158 (two miR-142-5p binding sites and one miR-142-3p binding sites), and SEQ ID NO:161 (two miR-155-5p binding sites and one miR-142-3p binding sites).

[0283] In another embodiment, the polynucleotide of the invention comprises at least two miR binding sites for microRNAs expressed in immune cells, wherein one of the miR binding sites is for miR-142-3p. In various embodiments, the polynucleotide of the invention comprises binding sites for miR-142-3p and miR-155 (miR-155-3p or miR-155-5p), miR-142-3p and miR-146 (miR-146-3 or miR-146-5p), or miR-142-3p and miR-126 (miR-126-3p or miR-126-5p).

[0284] In another embodiment, the polynucleotide of the invention comprises at least two miR binding sites for microRNAs expressed in immune cells, wherein one of the miR binding sites is for miR-126-3p. In various embodiments, the polynucleotide of the invention comprises binding sites for miR-126-3p and miR-155 (miR-155-3p or miR-155-5p), miR-126-3p and miR-146 (miR-146-3p or miR-146-5p), or miR-126-3p and miR-142 (miR-142-3p or miR-142-5p).

[0285] In another embodiment, the polynucleotide of the invention comprises at least two miR binding sites for microRNAs expressed in immune cells, wherein one of the miR binding sites is for miR-142-5p. In various embodiments, the polynucleotide of the invention comprises binding sites for miR-142-5p and miR-155 (miR-155-3p or miR-155-5p), miR-142-5p and miR-146 (miR-146-3 or miR-146-5p), or miR-142-5p and miR-126 (miR-126-3p or miR-126-5p).

[0286] In yet another embodiment, the polynucleotide of the invention comprises at least two miR binding sites for microRNAs expressed in immune cells, wherein one of the miR binding sites is for miR-155-5p. In various embodiments, the polynucleotide of the invention comprises binding sites for miR-155-5p and miR-142 (miR-142-3p or miR-142-5p), miR-155-5p and miR-146 (miR-146-3 or miR-146-5p), or miR-155-5p and miR-126 (miR-126-3p or miR-126-5p).

[0287] miRNA can also regulate complex biological processes such as angiogenesis (e.g., miR-132) (Anand and Cheresh Curr Opin Hematol 2011 18:171-176). In the polynucleotides of the invention, miRNA binding sites that are involved in such processes can be removed or introduced, in order to tailor the expression of the polynucleotides to biologically relevant cell types or relevant biological processes. In this context, the polynucleotides of the invention are defined as auxotrophic polynucleotides.

[0288] In some embodiments, a polynucleotide of the invention comprises a miRNA binding site, wherein the miRNA binding site comprises one or more nucleotide sequences selected from Table 4, including one or more copies of any one or more of the miRNA binding site sequences. In some embodiments, a polynucleotide of the invention further comprises at least one, two, three, four, five, six, seven, eight, nine, ten, or more of the same or different miRNA binding sites selected from Table 4, including any combination thereof.

[0289] In some embodiments, the miRNA binding site binds to miR-142 or is complementary to miR-142. In some embodiments, the miR-142 comprises SEQ ID NO:114. In some embodiments, the miRNA binding site binds to miR-142-3p or miR-142-5p. In some embodiments, the miR-142-3p binding site comprises SEQ ID NO:116. In some embodiments, the miR-142-5p binding site comprises SEQ ID NO:118. In some embodiments, the miRNA binding site comprises a nucleotide sequence at least 80%, at least 85%, at least 90%, at least 95%, or 100% identical to SEQ ID NO:116 or SEQ ID NO:118.

[0290] In some embodiments, the miRNA binding site binds to miR-126 or is complementary to miR-126. In some embodiments, the miR-126 comprises SEQ ID NO:119. In some embodiments, the miRNA binding site binds to miR-126-3p or miR-126-5p. In some embodiments, the miR-126-3p binding site comprises SEQ ID NO:121. In some embodiments, the miR-126-5p binding site comprises SEQ ID NO:123. In some embodiments, the miRNA binding site comprises a nucleotide sequence at least 80%, at least 85%, at least 90%, at least 95%, or 100% identical to SEQ ID NO:121 or SEQ ID NO:123.

[0291] In one embodiment, the 3′ UTR comprises two miRNA binding sites, wherein a first miRNA binding site binds to miR-142 and a second miRNA binding site binds to miR-126. In a specific embodiment, the 3′ UTR binding to miR-142 and miR-126 comprises, consists, or consists essentially of the sequence of SEQ ID NO:98 or 163.

TABLE 4
miR-142, miR-126, and miR-142
and miR-126 binding sites

| SEQ | | |
|---|---|---|
| ID | | |
| NO. | Description | Sequence |
| 114 | miR-142 | GACAGUGCAGUCACCCAUAAAGUAGAAAGCACUAC |
| | | UAACAGCACUGGAGGGUGUAGUGUUUCCUACUUUA |
| | | UGGAUGAGUGUACUGUG |
| 115 | miR-142-3p | UGUAGUGUUUCCUACUUUAUGGA |
| 116 | miR-142-3p | UCCAUAAAGUAGGAAACACUACA |
| | binding | |
| | site | |
| 117 | miR-142-5p | CAUAAAGUAGAAAGCACUACU |
| 118 | miR-142-5p | AGUAGUGCUUUCUACUUUAUG |
| | binding | |
| | site | |
| 119 | miR-126 | CGCUGGCGACGGGACAUUAUUACUUUUGGUACGCG |
| | | CUGUGACACUUCAAACUCGUACCGUGAGUAAUAAU |
| | | GCGCCGUCCACGGCA |
| 120 | miR-126-3p | uCGUACCGUGAGUAAUAAUGCG |
| 121 | miR-126-3p | CGCAUUAUUACUCACGGUACGA |
| | binding | |
| | site | |
| 122 | miR-126-5p | CAUUAUUACUUUUGGUACGCG |
| 123 | miR-126-5p | CGCGUACCAAAAGUAAUAAUG |
| | binding | |
| | site | |

[0292] In some embodiments, a miRNA binding site is inserted in the polynucleotide of the invention in any position of the polynucleotide (e.g., the 5′ UTR and/or 3′ UTR). In some embodiments, the 5′ UTR comprises a miRNA binding site. In some embodiments, the 3′ UTR comprises a miRNA binding site. In some embodiments, the 5′ UTR and the 3′ UTR comprise a miRNA binding site. The insertion site in the polynucleotide can be anywhere in the polynucleotide as long as the insertion of the miRNA binding site in the polynucleotide does not interfere with the translation of a functional polypeptide in the absence of the corresponding miRNA; and in the presence of the miRNA, the insertion of the miRNA binding site in the polynucleotide and the binding of the miRNA binding site to the corresponding miRNA are capable of degrading the polynucleotide or preventing the translation of the polynucleotide.

[0293] In some embodiments, a miRNA binding site is inserted in at least about 30 nucleotides downstream from the stop codon of an ORF in a polynucleotide of the invention comprising the ORF. In some embodiments, a miRNA binding site is inserted in at least about 10 nucleotides, at least about 15 nucleotides, at least about 20 nucleotides, at least about 25 nucleotides, at least about 30 nucleotides, at least about 35 nucleotides, at least about 40 nucleotides, at least about 45 nucleotides, at least about 50 nucleotides, at least about 55 nucleotides, at least about 60 nucleotides, at least about 65 nucleotides, at least about 70 nucleotides, at least about 75 nucleotides, at least about 80 nucleotides, at least about 85 nucleotides, at least about 90 nucleotides, at least about 95 nucleotides, or at least about 100 nucleotides downstream from the stop codon of an ORF in a polynucleotide of the invention. In some embodiments, a miRNA binding site is inserted in about 10 nucleotides to about 100 nucleotides, about 20 nucleotides to about 90 nucleotides, about 30 nucleotides to about 80 nucleotides, about 40 nucleotides to about 70 nucleotides, about 50 nucleotides to about 60 nucleotides, about 45 nucleotides to about 65 nucleotides downstream from the stop codon of an ORF in a polynucleotide of the invention.

[0294] In some embodiments, a miRNA binding site is inserted within the 3′ UTR immediately following the stop codon of the coding region within the polynucleotide of the invention, e.g., mRNA. In some embodiments, if there are multiple copies of a stop codon in the construct, a miRNA binding site is inserted immediately following the final stop codon. In some embodiments, a miRNA binding site is inserted further downstream of the stop codon, in which case there are 3′ UTR bases between the stop codon and the miR binding site(s). In some embodiments, three non-limiting examples of possible insertion sites for a miR in a 3′ UTR are shown in SEQ ID NOs:162, 163, and 164, which show a 3′ UTR sequence with a miR-142-3p site inserted in one of three different possible insertion sites, respectively, within the 3′ UTR.

[0295] In some embodiments, one or more miRNA binding sites can be positioned within the 5′ UTR at one or more possible insertion sites. For example, three non-limiting examples of possible insertion sites for a miR in a 5′ UTR are shown in SEQ ID NOs:165, 166, or 167, which show a 5′ UTR sequence with a miR-142-3p site inserted into one of three different possible insertion sites, respectively, within the 5′ UTR.

[0296] In one embodiment, a codon optimized open reading frame encoding a polypeptide of interest comprises a stop codon and the at least one microRNA binding site is located within the 3′ UTR 1-100 nucleotides after the stop codon. In one embodiment, the codon optimized open reading frame encoding the polypeptide of interest comprises a stop codon and the at least one microRNA binding site for a miR expressed in immune cells is located within the 3′ UTR 30-50 nucleotides after the stop codon. In another embodiment, the codon optimized open reading frame encoding the polypeptide of interest comprises a stop codon and the at least one microRNA binding site for a miR expressed in immune cells is located within the 3′ UTR at least 50 nucleotides after the stop codon. In other embodiments, the codon optimized open reading frame encoding the polypeptide of interest comprises a stop codon and the at least one microRNA binding site for a miR expressed in immune cells is located within the 3′ UTR immediately after the stop codon, or within the 3′ UTR 15-20 nucleotides after the stop codon or within the 3′ UTR 70-80 nucleotides after the stop codon. In other embodiments, the 3′ UTR comprises more than one miRNA bindingsite (e.g., 2-4 miRNA binding sites), wherein there can be a spacer region (e.g., of 10-100, 20-70 or 30-50 nucleotides in length) between each miRNA bindingsite. In another embodiment, the 3′ UTR comprises a spacer region between the end of the miRNA bindingsite(s) and the poly A tail nucleotides. For example, a spacer region of 10-100, 20-70 or 30-50 nucleotides in length can be situated between the end of the miRNA bindingsite(s) and the beginning of the poly A tail.

[0297] In one embodiment, a codon optimized open reading frame encoding a polypeptide of interest comprises a start codon and the at least one microRNA binding site is located within the 5′ UTR 1-100 nucleotides before (upstream of) the start codon. In one embodiment, the codon optimized open reading frame encoding the polypeptide of interest comprises a start codon and the at least one microRNA binding site for a miR expressed in immune cells is located within the 5′ UTR 10-50 nucleotides before (upstream of) the start codon. In another embodiment, the codon optimized open reading frame encoding the polypeptide of interest comprises a start codon and the at least one microRNA binding site for a miR expressed in immune cells is located within the 5′ UTR at least 25 nucleotides before (upstream of) the start codon. In other embodiments, the codon optimized open reading frame encoding the polypeptide of interest comprises a start codon and the at least one microRNA binding site for a miR expressed in immune cells is located within the 5′ UTR immediately before the start codon, or within the 5′ UTR 15-20 nucleotides before the start codon or within the 5′ UTR 70-80 nucleotides before the start codon. In other embodiments, the 5′ UTR comprises more than one miRNA binding site (e.g., 2-4 miRNA binding sites), wherein there can be a spacer region (e.g., of 10-100, 20-70 or 30-50 nucleotides in length) between each miRNA binding site.

[0298] In one embodiment, the 3′ UTR comprises more than one stop codon, wherein at least one miRNA binding site is positioned downstream of the stop codons. For example, a 3′ UTR can comprise 1, 2 or 3 stop codons. Non-limiting examples of triple stop codons that can be used include: UGAUAAUAG (SEQ ID NO:124), UGAUAGUAA (SEQ ID NO:125), UAAUGAUAG (SEQ ID NO:126), UGAUAAUAA (SEQ ID NO:127), UGAUAGUAG (SEQ ID NO:128), UAAUGAUGA (SEQ ID NO:129), UAAUAGUAG (SEQ ID NO:130), UGAUGAUGA (SEQ ID NO:131), UAAUAAUAA (SEQ ID NO:132), and UAGUAGUAG (SEQ ID NO:133). Within a 3′ UTR, for example, 1, 2, 3 or 4 miRNA binding sites, e.g., miR-142-3p binding sites, can be positioned immediately adjacent to the stop codon(s) or at any number of nucleotides downstream of the final stop codon. When the 3′ UTR comprises multiple miRNA binding sites, these binding sites can be positioned directly next to each other in the construct (i.e., one after the other) or, alternatively, spacer nucleotides can be positioned between each binding site.

[0299] In one embodiment, the 3′ UTR comprises three stop codons with a single miR-142-3p binding site located downstream of the 3rd stop codon. Non-limiting examples of sequences of 3′ UTR having three stop codons and a single miR-142-3p binding site located at different positions downstream of the final stop codon are shown in SEQ ID NOs:151, 162, 163, and 164.

TABLE 5A
5′ UTRs, 3′ UTRs, miR sequences, and miR binding sites

| SEQ | |
|---|---|
| ID NO: | Sequence |
| 134 | GCUGGAGCCUCGGUGGCCAUGCUUCUUGCCCCUUGGGCCUCCCCCCAGCCCC |
| | UCCUCCCCUUCCUGCACCCGUACCCCCUCCAUAAAGUAGGAAACACUACAGU |
| | GGUCUUUGAAUAAAGUCUGAGUGGGCGGC |
| | (3′ UTR with miR 142-3p binding site) |
| 116 | UCCAUAAAGUAGGAAACACUACA |
| | (miR 142-3p binding site) |
| 115 | UGUAGUGUUUCCUACUUUAUGGA |
| | (miR 142-3p sequence) |
| 117 | CAUAAAGUAGAAAGCACUACU |
| | (miR 142-5p sequence) |
| 135 | CCUCUGAAAUUCAGUUCUUCAG |
| | (miR 146-3p sequence) |
| 136 | UGAGAACUGAAUUCCAUGGGUU |
| | (miR 146-5p sequence) |
| 137 | CUCCUACAUAUUAGCAUUAACA |
| | (miR 155-3p sequence) |
| 138 | UUAAUGCUAAUCGUGAUAGGGGU |
| | (miR 155-5p sequence) |
| 120 | UCGUACCGUGAGUAAUAAUGCG |
| | (miR 126-3p sequence) |
| 122 | CAUUAUUACUUUUGGUACGCG |
| | (miR 126-5p sequence) |
| 139 | CCAGUAUUAACUGUGCUGCUGA |
| | (miR 16-3p sequence) |
| 140 | UAGCAGCACGUAAAUAUUGGCG |
| | (miR 16-5p sequence) |
| 141 | CAACACCAGUCGAUGGGCUGU |
| | (miR 21-3p sequence) |
| 142 | UAGCUUAUCAGACUGAUGUUGA |
| | (miR 21-5p sequence) |
| 143 | UGUCAGUUUGUCAAAUACCCCA |
| | (miR 223-3p sequence) |
| 144 | CGUGUAUUUGACAAGCUGAGUU |
| | (miR 223-5p sequence) |
| 145 | UGGCUCAGUUCAGCAGGAACAG |
| | (miR 24-3p sequence) |
| 146 | UGCCUACUGAGCUGAUAUCAGU |
| | (miR 24-5p sequence) |
| 147 | UUCACAGUGGCUAAGUUCCGC |
| | (miR 27-3p sequence) |
| 148 | AGGGCUUAGCUGCUUGUGAGCA |
| | (miR 27-5p sequence) |
| 121 | CGCAUUAUUACUCACGGUACGA |
| | (miR 126-3p binding site) |
| 149 | UGAUAAUAGGCUGGAGCCUCGGUGGCCAUGCUUCUUGCCCCUUGGGCCUCCC |
| | CCCAGCCCCUCCUCCCCUUCCUGCACCCGUACCCCC [symbol] |
| | [symbol] GUGGUCUUUGAAUAAAGUCUGAGUGGGCGGC |
| | (3′ UTR with miR 126-3p binding site) |
| 150 | UGAUAAUAGGCUGGAGCCUCGGUGGCCAUGCUUCUUGCCCCUUGGGCCUCCC |
| | CCCAGCCCCUCCUCCCCUUCCUGCACCCGUACCCCCGUGGUCUUUGAAUAAA |
| | GUCUGAGUGGGCGGC |
| | (3′ UTR, no miR binding sites) |
| 151 | UGAUAAUAGGCUGGAGCCUCGGUGGCCAUGCUUCUUGCCCCUUGGGCCUCCC |
| | CCCAGCCCCUCCUCCCCUUCCUGCACCCGUACCCCCUCCAUAAAGUAGGAAA |
| | CACUACAGUGGUCUUUGAAUAAAGUCUGAGUGGGCGGC |
| | (3′ UTR with miR 142-3p binding site) |
| 152 | UGAUAAUAGUCCAUAAAGUAGGAAACACUACAGCUGGAGCCUCGGUGGCCAU |
| | GCUUCUUGCCCCUUGGGCCUCCCCCCAGCCCCUCCUCCCCUUCCUGCACCCG |
| | UACCCCC [symbol] GUGGUCUUUGAAUAAAGUCUGAG |
| | UGGGCGGC |
| | (3′ UTR with miR 142-3p and miR 126-3p binding sites variant 1) |
| 153 | UUAAUGCUAAUUGUGAUAGGGGU |
| | (miR 155-5p sequence) |
| 154 | ACCCCUAUCACAAUUAGCAUUAA |
| | (miR 155-5p binding site) |
| 155 | UGAUAAUAGUCCAUAAAGUAGGAAACACUACAGCUGGAGCCUCGGUGGCCAU |
| | GCUUCUUGCCCCUUGGGCCUCCAUAAAGUAGGAAACACUACAUCCCCCCAGC |
| | CCCUCCUCCCCUUCCUGCACCCGUACCCCCUCCAUAAAGUAGGAAACACUAC |
| | AGUGGUCUUUGAAUAAAGUCUGAGUGGGCGGC |
| | (3′ UTR with 3 miR 142-3p binding sites) |
| 156 | UGAUAAUAGGCUGGAGCCUCGGUGGCCAUGCUUCUUGCCCCUUGGGCCUCCC |
| | CCCAGCCCCUCCUCCCCUUCCUGCACCCGUACCCCC [symbol] |
| | [symbol] GUGGUCUUUGAAUAAAGUCUGAGUGGGCGGC |
| | (3′ UTR with miR 142-5p binding site) |
| 157 | UGAUAAUAG [symbol] GCUGGAGCCUCGGUGGCCAUGC |
| | UUCUUGCCCCUUGGGCC [symbol] UCCCCCCAGCCCCU |
| | CCUCCCCUUCCUGCACCCGUACCCCC [symbol] GUGGU |
| | CUUUGAAUAAAGUCUGAGUGGGCGGC |
| | (3′ UTR with 3 miR 142-5p binding sites) |
| 158 | UGAUAAUAG [symbol] GCUGGAGCCUCGGUGGCCAUGC |
| | UUCUUGCCCCUUGGGCCUCCAUAAAGUAGGAAACACUACAUCCCCCCAGCCC |
| | CUCCUCCCCUUCCUGCACCCGUACCCCC [symbol] GUG |
| | GUCUUUGAAUAAAGUCUGAGUGGGCGGC |
| | (3′ UTR with 2 miR 142-5p binding sites and 1 miR 142-3p binding site) |
| 159 | UGAUAAUAGGCUGGAGCCUCGGUGGCCAUGCUUCUUGCCCCUUGGGCCUCCC |
| | CCCAGCCCCUCCUCCCCUUCCUGCACCCGUACCCCCACCCCUAUCACAAUUA |
| | GCAUUAAGUGGUCUUUGAAUAAAGUCUGAGUGGGCGGC |
| | (3′ UTR with miR 155-5p binding site) |
| 160 | UGAUAAUAGACCCCUAUCACAAUUAGCAUUAAGCUGGAGCCUCGGUGGCCAU |
| | GCUUCUUGCCCCUUGGGCCACCCCUAUCACAAUUAGCAUUAAUCCCCCCAGC |
| | CCCUCCUCCCCUUCCUGCACCCGUACCCCCACCCCUAUCACAAUUAGCAUUA |
| | AGUGGUCUUUGAAUAAAGUCUGAGUGGGCGGC |
| | (3′ UTR with 3 miR 155-5p binding sites) |
| 161 | UGAUAAUAGACCCCUAUCAC AAUUAG CAU UAAGCU GGAG CCUCGGU GGCCAU |
| | GCUUCUUGCCCCUUGGGCCUCCAUAAAGUAGGAAACACUACAUCCCCCCAGC |
| | CCCUCCUCCCCUUCCUGCACCCGUACCCCCACCCCUAUCACAAUUAGCAUUA |
| | AGUGGUCUUUGAAUAAAGUCUGAGUGGGCGGC |
| | (3′ UTR with 2 miR 155-5p binding sites and 1 miR 142-3p binding site) |
| 162 | UGAUAAUAGUCCAUAAAGUAGGAAACACUACAGCUGGAGCCUCGGUGGCCAU |
| | GCUUCUUGCCCCUUGGGCCUCCCCCCAGCCCCUCCUCCCCUUCCUGCACCCG |
| | UACCCCCGUGGUCUUUGAAUAAAGUCUGAGUGGGCGGC |
| | (3′ UTR with miR 142-3p binding site, P1 insertion) |
| 163 | UGAUAAUAGGCUGGAGCCUCGGUGGCUCCAUAAAGUAGGAAACACUACACAU |
| | GCUUCUUGCCCCUUGGGCCUCCCCCCAGCCCCUCCUCCCCUUCCUGCACCCG |
| | UACCCCCGUGGUCUUUGAAUAAAGUCUGAGUGGGCGGC |
| | (3′ UTR with miR 142-3p binding site, P2 insertion) |
| 164 | UGAUAAUAGGCUGGAGCCUCGGUGGCCAUGCUUCUUGCCCCUUGGGCCUCCA |
| | UAAAGUAGGAAACACUACAUCCCCCCAGCCCCUCCUCCCCUUCCUGCACCCG |
| | UACCCCCGUGGUCUUUGAAUAAAGUCUGAGUGGGCGGC |
| | (3′ UTR with miR 142-3p binding site, P3 insertion) |
| 118 | AGUAGUGCUUUCUACUUUAUG |
| | (miR-142-5p binding site) |
| 114 | GACAGUGCAGUCACCCAUAAAGUAGAAAGCACUACUAACAGCACUGGAGGGU |
| | GUAGUGUUUCCUACUUUAUGGAUGAGUGUACUGUG |
| | (miR-142) |
| 3 | GGGAAAUAAGAGAGAAAAGAAGAGUAAGAAGAAAUAUAAGAGCCACC |
| | (5′ UTR) |
| 165 | GGGAAAUAAGAGUCCAUAAAGUAGGAAACACUACAAGAAAAGAAGAGUAAGA |
| | AGAAAUAUAAGAGCCACC |
| | (5′ UTR with miR142-3p binding site at position pl) |
| 166 | GGGAAAUAAGAGAGAAAAGAAGAGUAAUCCAUAAAGUAGGAAACACUACAGA |
| | AGAAAUAUAAGAGCCACC |
| | (5′ UTR with miR142-3p binding site at position p2) |
| 167 | GGGAAAUAAGAGAGAAAAGAAGAGUAAGAAGAAAUAUAAUCCAUAAAGUAGG |
| | AAACACUACAGAGCCACC |
| | (5′ UTR with miR142-3p binding site at position p3) |
| 168 | ACCCCUAUCACAAUUAGCAUUAA |
| | (miR 155-5p binding site) |
| 169 | UGAUAAUAG [symbol] GCUGGAGCCUCGGUGGCCAUGC |
| | UUCUUGCCCCUUGGGCC [symbol] UCCCCCCAGCCCCU |
| | CUCCCCUUCCUGCACCCGUACCCCC [symbol] GUGGUC |
| | UUUGAAUAAAGUCUGAGUGGGCGGC |
| | (3′ UTR with 3 miR 142-5p binding sites) |
| 170 | UGAUAAUAGGCUGGAGCCUCGGUGGCCAUGCUUCUUGCCCCUUCCAUAAAGU |
| | AGGAAACACUACAUGGGCCUCCCCCCAGCCCCUCCUCCCCUUCCUGCACCCG |
| | UACCCCCGUGGUCUUUGAAUAAAGUCUGAGUGGGCGGC |
| | (3′ UTR including miR142-3p binding site) |
| 171 | UGAUAAUAGGCUGGAGCCUCGGUGGCCAUGCUUCUUGCCCCUUGGGCCUCCC |
| | CCCAGUCCAUAAAGUAGGAAACACUACACCCCUCCUCCCCUUCCUGCACCCG |
| | UACCCCCGUGGUCUUUGAAUAAAGUCUGAGUGGGCGGC |
| | (3′ UTR including miR142-3p binding site) |
| 172 | UGAUAAUAGGCUGGAGCCUCGGUGGCCAUGCUUCUUGCCCCUUGGGCCUCCC |
| | CCCAGCCCCUCCUCCCCUUCUCCAUAAAGUAGGAAACACUACACUGCACCCG |
| | UACCCCCGUGGUCUUUGAAUAAAGUCUGAGUGGGCGGC |
| | (3′ UTR including miR142-3p binding site) |
| 173 | UGAUAAUAGGCUGGAGCCUCGGUGGCCAUGCUUCUUGCCCCUUGGGCCUCCC |
| | CCCAGCCCCUCCUCCCCUUCCUGCACCCGUACCCCCGUGGUCUUUGAAUAAA |
| | GUUCCAUAAAGUAGGAAACACUACACUGAGUGGGCGGC |
| | (3′ UTR including miR142-3p binding site) |
| 174 | UGAUAAUAGUCCAUAAAGUAGGAAACACUACAGCUGGAGCCUCGGUGGCCUA |
| | GCUUCUUGCCCCUUGGGCCUCCCCCCAGCCCCUCCUCCCCUUCCUGCACCCG |
| | UACCCCCCGCAUUAUUACUCACGGUACGAGUGGUCUUUGAAUAAAGUCUGAG |
| | UGGGCGGC |
| | (3′ UTR with miR 142-3p and miR 126-3p binding sites variant 2) |
| 175 | UGAUAAUAGGCUGGAGCCUCGGUGGCCUAGCUUCUUGCCCCUUGGGCCUCCC |
| | CCCAGCCCCUCCUCCCCUUCCUGCACCCGUACCCCCGUGGUCUUUGAAUAAA |
| | GUCUGAGUGGGCGGC |
| | (3′ UTR, no miR binding sites variant 2) |
| 176 | UGAUAAUAGGCUGGAGCCUCGGUGGCCUAGCUUCUUGCCCCUUGGGCCUCCC |
| | CCCAGCCCCUCCUCCCCUUCCUGCACCCGUACCCCCUCCAUAAAGUAGGAAA |
| | CACUACAGUGGUCUUUGAAUAAAGUCUGAGUGGGCGGC |
| | (3′ UTR with miR 142-3p binding site variant 3) |
| 177 | UGAUAAUAGGCUGGAGCCUCGGUGGCCUAGCUUCUUGCCCCUUGGGCCUCCC |
| | CCCAGCCCCUCCUCCCCUUCCUGCACCCGUACCCCC [symbol] |
| | [symbol] GUGGUCUUUGAAUAAAGUCUGAGUGGGCGGC |
| | (3′ UTR with miR 126-3p binding site variant 3) |
| 178 | UGAUAAUAGUCCAUAAAGUAGGAAACACUACAGCUGGAGCCUCGGUGGCCUA |
| | GCUUCUUGCCCCUUGGGCCUCCAUAAAGUAGGAAACACUACAUCCCCCCAGC |
| | CCCUCCUCCCCUUCCUGCACCCGUACCCCCUCCAUAAAGUAGGAAACACUAC |
| | AGUGGUCUUUGAAUAAAGUCUGAGUGGGCGGC |
| | (3′ UTR with 3 miR 142-3p binding sites variant 2) |
| 179 | UGAUAAUAGUCCAUAAAGUAGGAAACACUACAGCUGGAGCCUCGGUGGCCUA |
| | GCUUCUUGCCCCUUGGGCCUCCCCCCAGCCCCUCCUCCCCUUCCUGCACCCG |
| | UACCCCCGUGGUCUUUGAAUAAAGUCUGAGUGGGCGGC |
| | (3′ UTR with miR 142-3p binding site, P1 insertion variant 2) |
| 180 | UGAUAAUAGGCUGGAGCCUCGGUGGCUCCAUAAAGUAGGAAACACUACACUA |
| | GCUUCUUGCCCCUUGGGCCUCCCCCCAGCCCCUCCUCCCCUUCCUGCACCCG |
| | UACCCCCGUGGUCUUUGAAUAAAGUCUGAGUGGGCGGC |
| | (3′ UTR with miR 142-3p binding site, P2 insertion variant 2) |
| 181 | UGAUAAUAGGCUGGAGCCUCGGUGGCCUAGCUUCUUGCCCCUUGGGCCUCCA |
| | UAAAGUAGGAAACACUACAUCCCCCCAGCCCCUCCUCCCCUUCCUGCACCCG |
| | UACCCCCGUGGUCUUUGAAUAAAGUCUGAGUGGGCGGC |
| | (3′ UTR with miR 142-3p binding site, P3 insertion variant 2) |
| 182 | UGAUAAUAGGCUGGAGCCUCGGUGGCCUAGCUUCUUGCCCCUUGGGCCUCCC |
| | CCCAGCCCCUCCUCCCCUUCCUGCACCCGUACCCCCACCCCUAUCACAAUUA |
| | GCAUUAAGUGGUCUUUGAAUAAAGUCUGAGUGGGCGGC |
| | (3′ UTR with miR 155-5p binding site variant 2) |
| 183 | UGAUAAUAGACCCCUAUCACAAUUAGCAUUAAGCUGGAGCCUCGGUGGCCUA |
| | GCUUCUUGCCCCUUGGGCCACCCCUAUCACAAUUAGCAUUAAUCCCCCCAGC |
| | CCCUCCUCCCCUUCCUGCACCCGUACCCCCACCCCUAUCACAAUUAGCAUUA |
| | AGUGGUCUUUGAAUAAAGUCUGAGUGGGCGGC |
| | (3′ UTR with 3 miR 155-5p binding sites variant 2) |
| 184 | UGAUAAUAGACCCCUAUCACAAUUAGCAUUAAGCUGGAGCCUCGGUGGCCUA |
| | GCUUCUUGCCCCUUGGGCCUCCAUAAAGUAGGAAACACUACAUCCCCCCAGC |
| | CCCUCCUCCCCUUCCUGCACCCGUACCCCCACCCCUAUCACAAUUAGCAUUA |
| | AGUGGUCUUUGAAUAAAGUCUGAGUGGGCGGC |
| | (3′ UTR with 2 miR 155-5p binding sites and 1 miR 142-3p binding site |
| | variant 2) |

Stop codon = bold
miR 142-3p binding site = underline
miR 126-3p binding site = bold underline
miR 155-5p binding site = shaded
miR 142-5p binding site = shaded and bold underline

TABLE 5B
Exemplary Preferred UTRs

| SEQ ID NO: | Sequence |
|---|---|
| 5′ UTR (v1) | GGGAAAUAAGAGAGAAAAGAAGAGUAAGAAGAAAUAUAAGAGCCACC |
| (SEQ ID NO: 3) | |
| 5′UTR (v1 A) | AGGAAAUAAGAGAGAAAAGAAGAGUAAGAAGAAAUAUAAGAGCCACC |
| (SEQ ID NO: 193) | |
| 5′ UTR (v1.1) | GGGAAAUAAGAGAGAAAAGAAGAGUAAGAAGAAAUAUAAGACCCCGGC |
| (SEQ ID NO: 39) | GCCGCCACC |
| 5′ UTR (v1.1 A) | AGGAAAUAAGAGAGAAAAGAAGAGUAAGAAGAAAUAUAAGACCCCGGC |
| (SEQ ID NO: 194) | GCCGCCACC |
| 3′ UTR (v1) | UGAUAAUAGGCUGGAGCCUCGGUGGCCAUGCUUCUUGCCCCUUGGGCC |
| (SEQ ID NO: 150) | UCCCCCCAGCCCCUCCUCCCCUUCCUGCACCCGUACCCCCGUGGUCUU |
| | UGAAUAAAGUCUGAGUGGGCGGC |
| 3′ UTR (v1.1) | UGAUAAUAGGCUGGAGCCUCGGUGGCCUAGCUUCUUGCCCCUUGGGCC |
| (SEQ ID NO: 175) | UCCCCCCAGCCCCUCCUCCCCUUCCUGCACCCGUACCCCCGUGGUCUU |
| | UGAAUAAAGUCUGAGUGGGCGGC |
| 3′ UTR (miR122) | UGAUAAUAGGCUGGAGCCUCGGUGGCCAUGCUUCUUGCCCCUUGGGCC |
| (SEQ ID NO: 195) | UCCCCCCAGCCCCUCCUCCCCUUCCUGCACCCGUACCCCCCAAACACC |
| | AUUGUCACACUCCAGUGGUCUUUGAAUAAAGUCUGAGUGGGCGGC |
| 3′ UTR (v1.1 miR122) | UGAUAAUAGGCUGGAGCCUCGGUGGCCUAGCUUCUUGCCCCUUGGGCC |
| (SEQ ID NO: 196) | UCCCCCCAGCCCCUCCUCCCCUUCCUGCACCCGUACCCCCCAAACACC |
| | AUUGUCACACUCCAGUGGUCUUUGAAUAAAGUCUGAGUGGGCGGC |
| 3′ UTR | UGAUAAUAGGCUGGAGCCUCGGUGGCCUAGCUUCUUGCCCCUUGGGCC |
| (v1.1 mir142-3p) | UCCCCCCAGCCCCUCCUCCCCUUCCUGCACCCGUACCCCCUCCAUAAA |
| (SEQ ID NO: 4) | GUAGGAAACACUACAGUGGUCUUUGAAUAAAGUCUGAGUGGGCGGC |
| 3′ UTR | UGAUAAUAGGCUGGAGCCUCGGUGGCCUAGCUUCUUGCCCCUUGGGCC |
| (v1.1 mir 126-3p) | UCCCCCCAGCCCCUCCUCCCCUUCCUGCACCCGUACCCCCCGCAUUAU |
| (SEQ ID NO: 177) | UACUCACGGUACGAGUGGUCUUUGAAUAAAGUCUGAGUGGGCGGC |
| 3′ UTR (mir-126, | UGAUAAUAGUCCAUAAAGUAGGAAACACUACAGCUGGAGCCUCGGUGG |
| miR-142-3p) | CCAUCCUUCUUGCCCCUUGGGCCUCCCCCCAGCCCCUCCUCCCCUUCC |
| (SEQ ID NO: 111) | UGCACCCGUACCCCCCGCAUUAUUACUCACGGUACGAGUGGUCUUUGA |
| | AUAAAGUCUGAGUGGGCGGC |
| 3′ UTR (v.1.1 3x | UGAUAAUAGUCCAUAAAGUAGGAAACACUACAGCUGGAGCCUCGGUGG |
| miR142-3p) | CCUAGCUUCUUGCCCCUUGGGCCUCCAUAAAGUAGGAAACACUACAUC |
| (SEQ ID NO: 178) | CCCCCAGCCCCUCCUCCCCUUCCUGCACCCGUACCCCCUCCAUAAAGU |
| | AGGAAACACUACAGUGGUCUUUGAAUAAAGUCUGAGUGGGCGGC |

[0300] In one embodiment, the polynucleotide of the invention comprises a 5′ UTR, a codon optimized open reading frame encoding a polypeptide of interest, a 3′ UTR comprising the at least one miRNA binding site for a miR expressed in immune cells, and a 3′ tailing region of linked nucleosides. In various embodiments, the 3′ UTR comprises 1-4, at least two, one, two, three or four miRNA binding sites for miRs expressed in immune cells, preferably abundantly or preferentially expressed in immune cells.

[0301] In one embodiment, the at least one miRNA expressed in immune cells is a miR-142-3p microRNA binding site. In one embodiment, the miR-142-3p microRNA binding site comprises the sequence shown in SEQ ID NO:116. In one embodiment, the 3′ UTR of the mRNA comprising the miR-142-3p microRNA binding site comprises the sequence shown in SEQ ID NO:134.

[0302] In one embodiment, the at least one miRNA expressed in immune cells is a miR-126 microRNA binding site. In one embodiment, the miR-126 binding site is a miR-126-3p binding site. In one embodiment, the miR-126-3p microRNA binding site comprises the sequence shown in SEQ ID NO:121. In one embodiment, the 3′ UTR of the mRNA of the invention comprising the miR-126-3p microRNA binding site comprises the sequence shown in SEQ ID NO:149.

[0303] Non-limiting exemplary sequences for miRs to which a microRNA binding site(s) of the disclosure can bind include the following: miR-142-3p (SEQ ID NO:115), miR-142-5p (SEQ ID NO:117), miR-146-3p (SEQ ID NO:135), miR-146-5p (SEQ ID NO:136), miR-155-3p (SEQ ID NO:137), miR-155-5p (SEQ ID NO:138), miR-126-3p (SEQ ID NO:120), miR-126-5p (SEQ ID NO:122), miR-16-3p (SEQ ID NO:139), miR-16-5p (SEQ ID NO:140), miR-21-3p (SEQ ID NO:141), miR-21-5p (SEQ ID NO:142), miR-223-3p (SEQ ID NO:143), miR-223-5p (SEQ ID NO:144), miR-24-3p (SEQ ID NO:145), miR-24-5p (SEQ ID NO:146), miR-27-3p (SEQ ID NO:147) and miR-27-5p (SEQ ID NO:148). Other suitable miR sequences expressed in immune cells (e.g., abundantly or preferentially expressed in immune cells) are known and available in the art, for example at the University of Manchester's microRNA database, miRBase. Sites that bind any of the aforementioned miRs can be designed based on Watson-Crick complementarity to the miR, typically 100% complementarity to the miR, and inserted into an mRNA construct of the disclosure as described herein.

[0304] In another embodiment, a polynucleotide of the present invention (e.g., and mRNA, e.g., the 3′ UTR thereof) can comprise at least one miRNA bindingsite to thereby reduce or inhibit accelerated blood clearance, for example by reducing or inhibiting production of IgMs, e.g., against PEG, by B cells and/or reducing or inhibiting proliferation and/or activation of pDCs, and can comprise at least one miRNA bindingsite for modulating tissue expression of an encoded protein of interest.

[0305] miRNA gene regulation can be influenced by the sequence surrounding the miRNA such as, but not limited to, the species of the surrounding sequence, the type of sequence (e.g., heterologous, homologous, exogenous, endogenous, or artificial), regulatory elements in the surrounding sequence and/or structural elements in the surrounding sequence. The miRNA can be influenced by the 5′UTR and/or 3′UTR. As a non-limiting example, a non-human 3′UTR can increase the regulatory effect of the miRNA sequence on the expression of a polypeptide of interest compared to a human 3′ UTR of the same sequence type.

[0306] In one embodiment, other regulatory elements and/or structural elements of the 5′ UTR can influence miRNA mediated gene regulation. One example of a regulatory element and/or structural element is a structured IRES (Internal Ribosome Entry Site) in the 5′ UTR, which is necessary for the binding of translational elongation factors to initiate protein translation. EIF4A2 binding to this secondarily structured element in the 5′-UTR is necessary for miRNA mediated gene expression (Meijer H A et al., Science, 2013, 340, 82-85, herein incorporated by reference in its entirety). The polynucleotides of the invention can further include this structured 5′ UTR in order to enhance microRNA mediated gene regulation.

[0307] At least one miRNA binding site can be engineered into the 3′ UTR of a polynucleotide of the invention. In this context, at least two, at least three, at least four, at least five, at least six, at least seven, at least eight, at least nine, at least ten, or more miRNA binding sites can be engineered into a 3′ UTR of a polynucleotide of the invention. For example, 1 to 10, 1 to 9, 1 to 8, 1 to 7, 1 to 6, 1 to 5, 1 to 4, 1 to 3, 2, or 1 miRNA binding sites can be engineered into the 3′UTR of a polynucleotide of the invention. In one embodiment, miRNA binding sites incorporated into a polynucleotide of the invention can be the same or can be different miRNA sites. A combination of different miRNA binding sites incorporated into a polynucleotide of the invention can include combinations in which more than one copy of any of the different miRNA sites are incorporated. In another embodiment, miRNA binding sites incorporated into a polynucleotide of the invention can target the same or different tissues in the body. As a non-limiting example, through the introduction of tissue-, cell-type-, or disease-specific miRNA binding sites in the 3′-UTR of a polynucleotide of the invention, the degree of expression in specific cell types (e.g., myeloid cells, endothelial cells, etc.) can be reduced.

[0308] In one embodiment, a miRNA binding site can be engineered near the 5′ terminus of the 3′UTR, about halfway between the 5′ terminus and 3′ terminus of the 3′UTR and/or near the 3′ terminus of the 3′ UTR in a polynucleotide of the invention. As a non-limiting example, a miRNA binding site can be engineered near the 5′ terminus of the 3′UTR and about halfway between the 5′ terminus and 3′ terminus of the 3′UTR. As another non-limiting example, a miRNA binding site can be engineered near the 3′ terminus of the 3′UTR and about halfway between the 5′ terminus and 3′ terminus of the 3′ UTR. As yet another non-limiting example, a miRNA binding site can be engineered near the 5′ terminus of the 3′ UTR and near the 3′ terminus of the 3′ UTR.

[0309] In another embodiment, a 3′UTR can comprise 1, 2, 3, 4, 5, 6, 7, 8, 9, or 10 miRNA binding sites. The miRNA binding sites can be complementary to a miRNA, miRNA seed sequence, and/or miRNA sequences flanking the seed sequence.

[0310] In some embodiments, the expression of a polynucleotide of the invention can be controlled by incorporating at least one sensor sequence in the polynucleotide and formulating the polynucleotide for administration. As a non-limiting example, a polynucleotide of the invention can be targeted to a tissue or cell by incorporating a miRNA binding site and formulating the polynucleotide in a lipid nanoparticle comprising an ionizable lipid, including any of the lipids described herein.

[0311] A polynucleotide of the invention can be engineered for more targeted expression in specific tissues, cell types, or biological conditions based on the expression patterns of miRNAs in the different tissues, cell types, or biological conditions. Through introduction of tissue-specific miRNA binding sites, a polynucleotide of the invention can be designed for optimal protein expression in a tissue or cell, or in the context of a biological condition.

[0312] In some embodiments, a polynucleotide of the invention can be designed to incorporate miRNA binding sites that either have 100% identity to known miRNA seed sequences or have less than 100% identity to miRNA seed sequences. In some embodiments, a polynucleotide of the invention can be designed to incorporate miRNA binding sites that have at least: 60%, 65%, 70%, 75%, 80%, 85%, 90%, 95%, 96%, 97%, 98%, or 99% identity to known miRNA seed sequences. The miRNA seed sequence can be partially mutated to decrease miRNA binding affinity and as such result in reduced downmodulation of the polynucleotide. In essence, the degree of match or mis-match between the miRNA binding site and the miRNA seed can act as a rheostat to more finely tune the ability of the miRNA to modulate protein expression. In addition, mutation in the non-seed region of a miRNA binding site can also impact the ability of a miRNA to modulate protein expression.

[0313] In one embodiment, a miRNA sequence can be incorporated into the loop of a stem loop.

[0314] In another embodiment, a miRNA seed sequence can be incorporated in the loop of a stem loop and a miRNA binding site can be incorporated into the 5′ or 3′ stem of the stem loop.

[0315] In one embodiment the miRNA sequence in the 5′ UTR can be used to stabilize a polynucleotide of the invention described herein.

[0316] In another embodiment, a miRNA sequence in the 5′ UTR of a polynucleotide of the invention can be used to decrease the accessibility of the site of translation initiation such as, but not limited to a start codon. See, e.g., Matsuda et al., PLoS One. 2010 11(5):e15057; incorporated herein by reference in its entirety, which used antisense locked nucleic acid (LNA) oligonucleotides and exon junction complexes (EJCs) around a start codon (−4 to +37 where the A of the AUG codons is +1) in order to decrease the accessibility to the first start codon (AUG). Matsuda showed that altering the sequence around the start codon with an LNA or EJC affected the efficiency, length and structural stability of a polynucleotide. A polynucleotide of the invention can comprise a miRNA sequence, instead of the LNA or EJC sequence described by Matsuda et al, near the site of translation initiation in order to decrease the accessibility to the site of translation initiation. The site of translation initiation can be prior to, after or within the miRNA sequence. As a non-limiting example, the site of translation initiation can be located within a miRNA sequence such as a seed sequence or binding site.

[0317] In some embodiments, a polynucleotide of the invention can include at least one miRNA in order to dampen the antigen presentation by antigen presenting cells. The miRNA can be the complete miRNA sequence, the miRNA seed sequence, the miRNA sequence without the seed, or a combination thereof. As a non-limiting example, a miRNA incorporated into a polynucleotide of the invention can be specific to the hematopoietic system. As another non-limiting example, a miRNA incorporated into a polynucleotide of the invention to dampen antigen presentation is miR-142-3p.

[0318] In some embodiments, a polynucleotide of the invention can include at least one miRNA in order to dampen expression of the encoded polypeptide in a tissue or cell of interest. As a non-limiting example a polynucleotide of the invention can include at least one miR-142-3p binding site, miR-142-3p seed sequence, miR-142-3p binding site without the seed, miR-142-5p binding site, miR-142-5p seed sequence, miR-142-5p binding site without the seed, miR-146 binding site, miR-146 seed sequence and/or miR-146 binding site without the seed sequence.

[0319] In some embodiments, a polynucleotide of the invention can comprise at least one miRNA binding site in the 3′UTR in order to selectively degrade mRNA therapeutics in the immune cells to subdue unwanted immunogenic reactions caused by therapeutic delivery. As a non-limiting example, the miRNA binding site can make a polynucleotide of the invention more unstable in antigen presenting cells. Non-limiting examples of these miRNAs include miR-142-5p, miR-142-3p, miR-146a-5p, and miR-146-3p.

[0320] In one embodiment, a polynucleotide of the invention comprises at least one miRNA sequence in a region of the polynucleotide that can interact with a RNA binding protein.

[0321] In some embodiments, the polynucleotide of the invention (e.g., a RNA, e.g., an mRNA) comprising (i) a sequence-optimized nucleotide sequence (e.g., an ORF) encoding a wound healing polypeptide (e.g., the wild-type sequence, functional fragment, or variant thereof) and (ii) a miRNA binding site (e.g., a miRNA binding site that binds to miR-142) and/or a miRNA binding site that binds to miR-126.

### 12. 3′ UTRS

[0322] In certain embodiments, a polynucleotide of the present invention (e.g., a polynucleotide comprising a nucleotide sequence encoding a wound healing polypeptide of the invention) further comprises a 3′ UTR.

[0323] 3′-UTR is the section of mRNA that immediately follows the translation termination codon and often contains regulatory regions that post-transcriptionally influence gene expression. Regulatory regions within the 3′-UTR can influence polyadenylation, translation efficiency, localization, and stability of the mRNA. In one embodiment, the 3′-UTR useful for the invention comprises a binding site for regulatory proteins or microRNAs.

[0324] In certain embodiments, the 3′ UTR useful for the polynucleotides of the invention comprises a 3′ UTR selected from the group consisting of SEQ ID NO:151 and 104 to 112, or any combination thereof. In certain embodiments, the 3′ UTR useful for the polynucleotides of the invention comprises a 3′ UTR selected from the group consisting of SEQ ID NO:150, SEQ ID NO:175, SEQ ID NO:195, SEQ ID NO:196, SEQ ID NO:4, SEQ ID NO:177, SEQ ID NO:111, or SEQ ID NO:178, or any combination thereof. In some embodiments, the 3′ UTR comprises a nucleic acid sequence selected from the group consisting of SEQ ID NO:111, 112, or any combination thereof. In some embodiments, the 3′ UTR comprises a nucleic acid sequence of SEQ ID NO:111. In some embodiments, the 3′ UTR comprises a nucleic acid sequence of SEQ ID NO:112. In some embodiments, the 3′UTR comprises a nucleic acid sequence of SEQ ID NO:150. In some embodiments, the 3′UTR comprises a nucleic acid sequence of SEQ ID NO:151. In some embodiments, the 3′UTR comprises a nucleic acid sequence of SEQ ID NO:178. In some embodiments, the 3′UTR comprises a nucleic acid sequence of SEQ ID NO:175. In some embodiments, the 3′UTR comprises a nucleic acid sequence of SEQ ID NO:195. In some embodiments, the 3′UTR comprises a nucleic acid sequence of SEQ ID NO:196. In some embodiments, the 3′UTR comprises a nucleic acid sequence of SEQ ID NO:4. In some embodiments, the 3′UTR comprises a nucleic acid sequence of SEQ ID NO:177.

[0325] In certain embodiments, the 3′ UTR sequence useful for the invention comprises a nucleotide sequence at least about 60%, at least about 70%, at least about 80%, at least about 90%, at least about 95%, at least about 96%, at least about 97%, at least about 98%, at least about 99%, or about 100% identical to a sequence selected from the group consisting of 3′ UTR sequences selected from the group consisting of SEQ ID NO:104 to 112, 150, 151, and 178, or any combination thereof.

[0326] In certain embodiments, the 3′ UTR sequence useful for the invention comprises a nucleotide sequence at least about 60%, at least about 70%, at least about 80%, at least about 90%, at least about 95%, at least about 96%, at least about 97%, at least about 98%, at least about 99%, or about 100% identical to a sequence selected from the group consisting of 3′ UTR sequences selected from the group consisting of SEQ ID NO:150, SEQ ID NO:175, SEQ ID NO:195, SEQ ID NO:196, SEQ ID NO:4, SEQ ID NO:177, SEQ ID NO:111, and SEQ ID NO:178, or any combination thereof.

### 13. REGIONS HAVING A 5′ CAP

[0327] The disclosure also includes a polynucleotide that comprises both a 5′ Cap and a polynucleotide of the present invention (e.g., a polynucleotide comprising a nucleotide sequence encoding a wound healing polypeptide).

[0328] The 5′ cap structure of a natural mRNA is involved in nuclear export, increasing mRNA stability and binds the mRNA Cap Binding Protein (CBP), which is responsible for mRNA stability in the cell and translation competency through the association of CBP with poly(A) binding protein to form the mature cyclic mRNA species. The cap further assists the removal of 5′ proximal introns during mRNA splicing.

[0329] Endogenous mRNA molecules can be 5′-end capped generating a 5′-ppp-5′-triphosphate linkage between a terminal guanosine cap residue and the 5′-terminal transcribed sense nucleotide of the mRNA molecule. This 5′-guanylate cap can then be methylated to generate an N7-methyl-guanylate residue. The ribose sugars of the terminal and/or anteterminal transcribed nucleotides of the 5′ end of the mRNA can optionally also be 2′-O-methylated. 5′-decapping through hydrolysis and cleavage of the guanylate cap structure can target a nucleic acid molecule, such as an mRNA molecule, for degradation.

[0330] In some embodiments, the polynucleotides of the present invention (e.g., a polynucleotide comprising a nucleotide sequence encoding a wound healing polypeptide) incorporate a cap moiety.

[0331] In some embodiments, polynucleotides of the present invention (e.g., a polynucleotide comprising a nucleotide sequence encoding a wound healing polypeptide) comprise a non-hydrolyzable cap structure preventing decapping and thus increasing mRNA half-life. Because cap structure hydrolysis requires cleavage of 5′-ppp-5′ phosphorodiester linkages, modified nucleotides can be used during the capping reaction. For example, a Vaccinia Capping Enzyme from New England Biolabs (Ipswich, Mass.) can be used with α-thio-guanosine nucleotides according to the manufacturer's instructions to create a phosphorothioate linkage in the 5′-ppp-5′ cap. Additional modified guanosine nucleotides can be used such as α-methyl-phosphonate and seleno-phosphate nucleotides.

[0332] Additional modifications include, but are not limited to, 2′-O-methylation of the ribose sugars of 5′-terminal and/or 5′-anteterminal nucleotides of the polynucleotide (as mentioned above) on the 2′-hydroxyl group of the sugar ring. Multiple distinct 5′-cap structures can be used to generate the 5′-cap of a nucleic acid molecule, such as a polynucleotide that functions as an mRNA molecule. Cap analogs, which herein are also referred to as synthetic cap analogs, chemical caps, chemical cap analogs, or structural or functional cap analogs, differ from natural (i.e., endogenous, wild-type or physiological) 5′-caps in their chemical structure, while retaining cap function. Cap analogs can be chemically (i.e., non-enzymatically) or enzymatically synthesized and/or linked to the polynucleotides of the invention.

[0333] For example, the Anti-Reverse Cap Analog (ARCA) cap contains two guanines linked by a 5′-5′-triphosphate group, wherein one guanine contains an N7 methyl group as well as a 3′-O-methyl group (i.e., N7,3′-O-dimethyl-guanosine-5′-triphosphate-5′-guanosine (m⁷G-3′mppp-G; which can equivalently be designated 3′ O-Me-m7G(5′)ppp(5′)G). The 3′-O atom of the other, unmodified, guanine becomes linked to the 5′-terminal nucleotide of the capped polynucleotide. The N7- and 3′-O-methlyated guanine provides the terminal moiety of the capped polynucleotide.

[0334] Another exemplary cap is mCAP, which is similar to ARCA but has a 2′-O-methyl group on guanosine (i.e., N7,2′-O-dimethyl-guanosine-5′-triphosphate-5′-guanosine, m⁷Gm-ppp-G).

[0335] In some embodiments, the cap is a dinucleotide cap analog. As a non-limiting example, the dinucleotide cap analog can be modified at different phosphate positions with a boranophosphate group or a phosphoroselenoate group such as the dinucleotide cap analogs described in U.S. Pat. No. 8,519,110, the contents of which are herein incorporated by reference in its entirety.

[0336] In another embodiment, the cap is a cap analog is a N7-(4-chlorophenoxyethyl) substituted dinucleotide form of a cap analog known in the art and/or described herein. Non-limiting examples of a N7-(4-chlorophenoxyethyl) substituted dinucleotide form of a cap analog include a N7-(4-chlorophenoxyethyl)-G(5′)ppp(5′)G and a N7-(4-chlorophenoxyethyl)-m^{3′-O}G(5)ppp(5′)G cap analog (See, e.g., the various cap analogs and the methods of synthesizing cap analogs described in Kore et al. Bioorganic & Medicinal Chemistry 2013 21:4570-4574; the contents of which are herein incorporated by reference in its entirety). In another embodiment, a cap analog of the present invention is a 4-chloro/bromophenoxyethyl analog.

[0337] While cap analogs allow for the concomitant capping of a polynucleotide or a region thereof, in an in vitro transcription reaction, up to 20% of transcripts can remain uncapped. This, as well as the structural differences of a cap analog from an endogenous 5′-cap structures of nucleic acids produced by the endogenous, cellular transcription machinery, can lead to reduced translational competency and reduced cellular stability.

[0338] Polynucleotides of the invention (e.g., a polynucleotide comprising a nucleotide sequence encoding a wound healing polypeptide) can also be capped post-manufacture (whether IVT or chemical synthesis), using enzymes, in order to generate more authentic 5′-cap structures. As used herein, the phrase “more authentic” refers to a feature that closely mirrors or mimics, either structurally or functionally, an endogenous or wild type feature. That is, a “more authentic” feature is better representative of an endogenous, wild-type, natural or physiological cellular function and/or structure as compared to synthetic features or analogs, etc., of the prior art, or which outperforms the corresponding endogenous, wild-type, natural or physiological feature in one or more respects. Non-limiting examples of more authentic 5′cap structures of the present invention are those that, among other things, have enhanced binding of cap binding proteins, increased half-life, reduced susceptibility to 5′ endonucleases and/or reduced 5′decapping, as compared to synthetic 5′cap structures known in the art (or to a wild-type, natural or physiological 5′cap structure). For example, recombinant Vaccinia Virus Capping Enzyme and recombinant 2′-O-methyltransferase enzyme can create a canonical 5′-5′-triphosphate linkage between the 5′-terminal nucleotide of a polynucleotide and a guanine cap nucleotide wherein the cap guanine contains an N7 methylation and the 5′-terminal nucleotide of the mRNA contains a 2′-O-methyl. Such a structure is termed the Cap1 structure. This cap results in a higher translational-competency and cellular stability and a reduced activation of cellular pro-inflammatory cytokines, as compared, e.g., to other 5′cap analog structures known in the art. Cap structures include, but are not limited to, 7mG(5′)ppp(5′)N, pN2p (cap 0), 7mG(5′)ppp(5′)NlmpNp (cap 1), and 7mG(5′)-ppp(5′)NlmpN2mp (cap 2).

[0339] As a non-limiting example, capping chimeric polynucleotides post-manufacture can be more efficient as nearly 100% of the chimeric polynucleotides can be capped. This is in contrast to ˜80% when a cap analog is linked to a chimeric polynucleotide in the course of an in vitro transcription reaction.

[0340] According to the present invention, 5′ terminal caps can include endogenous caps or cap analogs. According to the present invention, a 5′ terminal cap can comprise a guanine analog. Useful guanine analogs include, but are not limited to, inosine, N1-methyl-guanosine, 2′fluoro-guanosine, 7-deaza-guanosine, 8-oxo-guanosine, 2-amino-guanosine, LNA-guanosine, and 2-azido-guanosine.

### 14. POLY-A TAILS

[0341] In some embodiments, the polynucleotides of the present disclosure (e.g., a polynucleotide comprising a nucleotide sequence encoding a wound healing polypeptide) further comprise a poly-A tail. In further embodiments, terminal groups on the poly-A tail can be incorporated for stabilization. In other embodiments, a poly-A tail comprises des-3′ hydroxyl tails.

[0342] During RNA processing, a long chain of adenine nucleotides (poly-A tail) can be added to a polynucleotide such as an mRNA molecule in order to increase stability. Immediately after transcription, the 3′ end of the transcript can be cleaved to free a 3′ hydroxyl. Then poly-A polymerase adds a chain of adenine nucleotides to the RNA. The process, called polyadenylation, adds a poly-A tail that can be between, for example, approximately 80 to approximately 250 residues long, including approximately 80, 90, 100, 110, 120, 130, 140, 150, 160, 170, 180, 190, 200, 210, 220, 230, 240 or 250 residues long. In one embodiment, the poly-A tail is 100 nucleotides in length (SEQ ID NO:272).

[0343] PolyA tails can also be added after the construct is exported from the nucleus.

[0344] According to the present invention, terminal groups on the poly A tail can be incorporated for stabilization. Polynucleotides of the present invention can include des-3′ hydroxyl tails. They can also include structural moieties or 2′-Omethyl modifications as taught by Junjie Li, et al. (Current Biology, Vol. 15, 1501-1507, Aug. 23, 2005, the contents of which are incorporated herein by reference in its entirety).

[0345] The polynucleotides of the present invention can be designed to encode transcripts with alternative polyA tail structures including histone mRNA. According to Norbury, “Terminal uridylation has also been detected on human replication-dependent histone mRNAs. The turnover of these mRNAs is thought to be important for the prevention of potentially toxic histone accumulation following the completion or inhibition of chromosomal DNA replication. These mRNAs are distinguished by their lack of a 3′ poly(A) tail, the function of which is instead assumed by a stable stem-loop structure and its cognate stem-loop binding protein (SLBP); the latter carries out the same functions as those of PABP on polyadenylated mRNAs” (Norbury, “Cytoplasmic RNA: a case of the tail wagging the dog,” Nature Reviews Molecular Cell Biology; AOP, published online 29 Aug. 2013; doi:10.1038/nrm3645) the contents of which are incorporated herein by reference in its entirety.

[0346] Unique poly-A tail lengths provide certain advantages to the polynucleotides of the present invention. Generally, the length of a poly-A tail, when present, is greater than 30 nucleotides in length. In another embodiment, the poly-A tail is greater than 35 nucleotides in length (e.g., at least or greater than about 35, 40, 45, 50, 55, 60, 70, 80, 90, 100, 120, 140, 160, 180, 200, 250, 300, 350, 400, 450, 500, 600, 700, 800, 900, 1,000, 1,100, 1,200, 1,300, 1,400, 1,500, 1,600, 1,700, 1,800, 1,900, 2,000, 2,500, and 3,000 nucleotides).

[0347] In some embodiments, the polynucleotide or region thereof includes from about 30 to about 3,000 nucleotides (e.g., from 30 to 50, from 30 to 100, from 30 to 250, from 30 to 500, from 30 to 750, from 30 to 1,000, from 30 to 1,500, from 30 to 2,000, from 30 to 2,500, from 50 to 100, from 50 to 250, from 50 to 500, from 50 to 750, from 50 to 1,000, from 50 to 1,500, from 50 to 2,000, from 50 to 2,500, from 50 to 3,000, from 100 to 500, from 100 to 750, from 100 to 1,000, from 100 to 1,500, from 100 to 2,000, from 100 to 2,500, from 100 to 3,000, from 500 to 750, from 500 to 1,000, from 500 to 1,500, from 500 to 2,000, from 500 to 2,500, from 500 to 3,000, from 1,000 to 1,500, from 1,000 to 2,000, from 1,000 to 2,500, from 1,000 to 3,000, from 1,500 to 2,000, from 1,500 to 2,500, from 1,500 to 3,000, from 2,000 to 3,000, from 2,000 to 2,500, and from 2,500 to 3,000).

[0348] In some embodiments, the poly-A tail is designed relative to the length of the overall polynucleotide or the length of a particular region of the polynucleotide. This design can be based on the length of a coding region, the length of a particular feature or region or based on the length of the ultimate product expressed from the polynucleotides.

[0349] In this context, the poly-A tail can be 10, 20, 30, 40, 50, 60, 70, 80, 90, or 100% greater in length than the polynucleotide or feature thereof. The poly-A tail can also be designed as a fraction of the polynucleotides to which it belongs. In this context, the poly-A tail can be 10, 20, 30, 40, 50, 60, 70, 80, or 90% or more of the total length of the construct, a construct region or the total length of the construct minus the poly-A tail. Further, engineered binding sites and conjugation of polynucleotides for Poly-A binding protein can enhance expression.

[0350] Additionally, multiple distinct polynucleotides can be linked together via the PABP (Poly-A binding protein) through the 3′-end using modified nucleotides at the 3′-terminus of the poly-A tail. Transfection experiments can be conducted in relevant cell lines at and protein production can be assayed by ELISA at 12 hr, 24 hr, 48 hr, 72 hr and day 7 post-transfection.

[0351] In some embodiments, the polynucleotides of the present invention are designed to include a polyA-G Quartet region. The G-quartet is a cyclic hydrogen bonded array of four guanine nucleotides that can be formed by G-rich sequences in both DNA and RNA. In this embodiment, the G-quartet is incorporated at the end of the poly-A tail. The resultant polynucleotide is assayed for stability, protein production and other parameters including half-life at various time points. It has been discovered that the polyA-G quartet results in protein production from an mRNA equivalent to at least 75% of that seen using a poly-A tail of 120 nucleotides (SEQ ID NO:273) alone.

### 15. START CODON REGION

[0352] The invention also includes a polynucleotide that comprises both a start codon region and the polynucleotide described herein (e.g., a polynucleotide comprising a nucleotide sequence encoding a wound healing polypeptide). In some embodiments, the polynucleotides of the present invention can have regions that are analogous to or function like a start codon region.

[0353] In some embodiments, the translation of a polynucleotide can initiate on a codon that is not the start codon AUG. Translation of the polynucleotide can initiate on an alternative start codon such as, but not limited to, ACG, AGG, AAG, CTG/CUG, GTG/GUG, ATA/AUA, ATT/AUU, TTG/UUG (see Touriol et al.

[0354] Biology of the Cell 95 (2003) 169-178 and Matsuda and Mauro PLoS ONE, 2010 5:11; the contents of each of which are herein incorporated by reference in its entirety).

[0355] As a non-limiting example, the translation of a polynucleotide begins on the alternative start codon ACG. As another non-limiting example, polynucleotide translation begins on the alternative start codon CTG or CUG. As yet another non-limiting example, the translation of a polynucleotide begins on the alternative start codon GTG or GUG.

[0356] Nucleotides flanking a codon that initiates translation such as, but not limited to, a start codon or an alternative start codon, are known to affect the translation efficiency, the length and/or the structure of the polynucleotide. (See, e.g., Matsuda and Mauro PLoS ONE, 2010 5:11; the contents of which are herein incorporated by reference in its entirety). Masking any of the nucleotides flanking a codon that initiates translation can be used to alter the position of translation initiation, translation efficiency, length and/or structure of a polynucleotide.

[0357] In some embodiments, a masking agent can be used near the start codon or alternative start codon in order to mask or hide the codon to reduce the probability of translation initiation at the masked start codon or alternative start codon. Non-limiting examples of masking agents include antisense locked nucleic acids (LNA) polynucleotides and exon junction complexes (EJCs) (See, e.g., Matsuda and Mauro describing masking agents LNA polynucleotides and EJCs (PLoS ONE, 2010 5:11); the contents of which are herein incorporated by reference in its entirety).

[0358] In another embodiment, a masking agent can be used to mask a start codon of a polynucleotide in order to increase the likelihood that translation will initiate on an alternative start codon. In some embodiments, a masking agent can be used to mask a first start codon or alternative start codon in order to increase the chance that translation will initiate on a start codon or alternative start codon downstream to the masked start codon or alternative start codon.

[0359] In some embodiments, a start codon or alternative start codon can be located within a perfect complement for a miRNA binding site. The perfect complement of a miRNA binding site can help control the translation, length and/or structure of the polynucleotide similar to a masking agent. As a non-limiting example, the start codon or alternative start codon can be located in the middle of a perfect complement for a miRNA binding site. The start codon or alternative start codon can be located after the first nucleotide, second nucleotide, third nucleotide, fourth nucleotide, fifth nucleotide, sixth nucleotide, seventh nucleotide, eighth nucleotide, ninth nucleotide, tenth nucleotide, eleventh nucleotide, twelfth nucleotide, thirteenth nucleotide, fourteenth nucleotide, fifteenth nucleotide, sixteenth nucleotide, seventeenth nucleotide, eighteenth nucleotide, nineteenth nucleotide, twentieth nucleotide or twenty-first nucleotide.

[0360] In another embodiment, the start codon of a polynucleotide can be removed from the polynucleotide sequence in order to have the translation of the polynucleotide begin on a codon that is not the start codon. Translation of the polynucleotide can begin on the codon following the removed start codon or on a downstream start codon or an alternative start codon. In a non-limiting example, the start codon ATG or AUG is removed as the first 3 nucleotides of the polynucleotide sequence in order to have translation initiate on a downstream start codon or alternative start codon. The polynucleotide sequence where the start codon was removed can further comprise at least one masking agent for the downstream start codon and/or alternative start codons in order to control or attempt to control the initiation of translation, the length of the polynucleotide and/or the structure of the polynucleotide.

### 16. STOP CODON REGION

[0361] The invention also includes a polynucleotide that comprises both a stop codon region and the polynucleotide described herein (e.g., a polynucleotide comprising a nucleotide sequence encoding a wound healing polypeptide). In some embodiments, the polynucleotides of the present invention can include at least two stop codons before the 3′ untranslated region (UTR). The stop codon can be selected from TGA, TAA and TAG in the case of DNA, or from UGA, UAA and UAG in the case of RNA. In some embodiments, the polynucleotides of the present invention include the stop codon TGA in the case or DNA, or the stop codon UGA in the case of RNA, and one additional stop codon. In a further embodiment the addition stop codon can be TAA or UAA. In another embodiment, the polynucleotides of the present invention include three consecutive stop codons, four stop codons, or more.

### 17. POLYNUCLEOTIDE COMPRISING AN MRNA ENCODING A WOUND HEALING POLYPEPTIDE

[0362] In certain embodiments, a polynucleotide of the present disclosure, for example a polynucleotide comprising an mRNA nucleotide sequence encoding a wound healing polypeptide, comprises from 5′ to 3′ end:

[0363] (i) a 5′ cap provided above;

[0364] (ii) a 5′ UTR, such as the sequences provided above;

[0365] (iii) an ORF encoding a human wound healing polypeptide (e.g., a wound healing polypeptide described in Table 1);

[0366] (iv) at least one stop codon;

[0367] (v) a 3′ UTR, such as the sequences provided above; and

[0368] (vi) a poly-A tail provided above.

[0369] In some embodiments, the polynucleotide further comprises a miRNA binding site, e.g., a miRNA binding site that binds to miRNA-142. In some embodiments, the 5′ UTR comprises the miRNA binding site. In some embodiments, the 3′ UTR comprises the miRNA binding site.

[0370] In some embodiments, a polynucleotide of the present disclosure comprises a nucleotide sequence encoding a polypeptide sequence at least 70%, at least 80%, at least 81%, at least 82%, at least 83%, at least 84%, at least 85%, at least 86%, at least 87%, at least 88%, at least 89%, at least 90%, at least 91%, at least 92%, at least 93%, at least 94%, at least 95%, at least 96%, at least 97%, at least 98%, at least 99%, or 100% identical to the protein sequence of a wild type human wound healing polypeptide.

[0371] In some embodiments, a polynucleotide of the present disclosure, for example a polynucleotide comprising an mRNA nucleotide sequence encoding a polypeptide, comprises (1) a 5′ cap provided above, for example, CAP1, (2) a 5′ UTR, (3) a nucleotide sequence encoding a human wound healing polypeptide, (3) a stop codon, (4) a 3′UTR, and (5) a poly-A tail provided above, for example, a poly-A tail of about 100 residues.

[0372] In some embodiments, a polynucleotide of the present disclosure, for example a polynucleotide comprising an mRNA nucleotide sequence encoding a wound healing polypeptide, comprises (1) a 5′ cap provided above, for example, CAP1, (2) a nucleotide sequence encoding a wound healing polypeptide (e.g., a wound healing polypeptide described in Table 1), and (3) a poly-A tail provided above, for example, a poly A tail of ˜100 residues. In certain embodiments, all uracils in the mRNA sequence encoding the wound healing polypeptide are replaced by 5-methoxyuracil.

### 18. METHODS OF MAKING POLYNUCLEOTIDES

[0373] The present disclosure also provides methods for making a polynucleotide of the invention (e.g., a polynucleotide comprising a nucleotide sequence encoding a wound healing polypeptide) or a complement thereof.

[0374] In some aspects, a polynucleotide (e.g., a RNA, e.g., an mRNA) disclosed herein, and encoding a wound healing polypeptide, can be constructed using in vitro transcription (IVT). In other aspects, a polynucleotide (e.g., a RNA, e.g., an mRNA) disclosed herein, and encoding a wound healing polypeptide, can be constructed by chemical synthesis using an oligonucleotide synthesizer.

[0375] In other aspects, a polynucleotide (e.g., a RNA, e.g., an mRNA) disclosed herein, and encoding a wound healing polypeptide is made by using a host cell. In certain aspects, a polynucleotide (e.g., a RNA, e.g., an mRNA) disclosed herein, and encoding a wound healing polypeptide is made by one or more combination of the IVT, chemical synthesis, host cell expression, or any other methods known in the art.

[0376] Naturally occurring nucleosides, non-naturally occurring nucleosides, or combinations thereof, can totally or partially naturally replace occurring nucleosides present in the candidate nucleotide sequence and can be incorporated into a sequence-optimized nucleotide sequence (e.g., a RNA, e.g., an mRNA) encoding a wound healing polypeptide. The resultant polynucleotides, e.g., mRNAs, can then be examined for their ability to produce protein and/or produce a therapeutic outcome.

[0377] a. In Vitro Transcription/Enzymatic Synthesis

[0378] The polynucleotides of the present invention disclosed herein (e.g., a polynucleotide comprising a nucleotide sequence encoding a wound healing polypeptide) can be transcribed using an in vitro transcription (IVT) system. The system typically comprises a transcription buffer, nucleotide triphosphates (NTPs), an RNase inhibitor and a polymerase. The NTPs can be selected from, but are not limited to, those described herein including natural and unnatural (modified) NTPs. The polymerase can be selected from, but is not limited to, T7 RNA polymerase, T3 RNA polymerase and mutant polymerases such as, but not limited to, polymerases able to incorporate polynucleotides disclosed herein. See U.S. Publ. No. US20130259923, which is herein incorporated by reference in its entirety.

[0379] Any number of RNA polymerases or variants can be used in the synthesis of the polynucleotides of the present invention. RNA polymerases can be modified by inserting or deleting amino acids of the RNA polymerase sequence. As a non-limiting example, the RNA polymerase can be modified to exhibit an increased ability to incorporate a 2′-modified nucleotide triphosphate compared to an unmodified RNA polymerase (see International Publication WO2008078180 and U.S. Pat. No. 8,101,385; herein incorporated by reference in their entireties).

[0380] Variants can be obtained by evolving an RNA polymerase, optimizing the RNA polymerase amino acid and/or nucleic acid sequence and/or by using other methods known in the art. As a non-limiting example, T7 RNA polymerase variants can be evolved using the continuous directed evolution system set out by Esvelt et al. (Nature 472:499-503 (2011); herein incorporated by reference in its entirety) where clones of T7 RNA polymerase can encode at least one mutation such as, but not limited to, lysine at position 93 substituted for threonine (K93T), I4M, A7T, E63V, V64D, A65E, D66Y, T76N, C125R, S128R, A136T, N165S, G175R, H176L, Y178H, F182L, L196F, G198V, D208Y, E222K, S228A, Q239R, T243N, G259D, M267I, G280C, H300R, D351A, A354S, E356D, L360P, A383V, Y385C, D388Y, S397R, M401T, N410S, K450R, P451T, G452V, E484A, H523L, H524N, G542V, E565K, K577E, K577M, N601S, S684Y, L699I, K713E, N748D, Q754R, E775K, A827V, D851N or L864F. As another non-limiting example, T7 RNA polymerase variants can encode at least mutation as described in U.S. Pub. Nos. 20100120024 and 20070117112; herein incorporated by reference in their entireties. Variants of RNA polymerase can also include, but are not limited to, substitutional variants, conservative amino acid substitution, insertional variants, and/or deletional variants.

[0381] In one aspect, the polynucleotide can be designed to be recognized by the wild type or variant RNA polymerases. In doing so, the polynucleotide can be modified to contain sites or regions of sequence changes from the wild type or parent chimeric polynucleotide.

[0382] Polynucleotide or nucleic acid synthesis reactions can be carried out by enzymatic methods utilizing polymerases. Polymerases catalyze the creation of phosphodiester bonds between nucleotides in a polynucleotide or nucleic acid chain. Currently known DNA polymerases can be divided into different families based on amino acid sequence comparison and crystal structure analysis. DNA polymerase I (pol I) or A polymerase family, including the Klenow fragments of E. coli, Bacillus DNA polymerase I, Thermus aquaticus (Taq) DNA polymerases, and the T7 RNA and DNA polymerases, is among the best studied of these families. Another large family is DNA polymerase a (pol a) or B polymerase family, including all eukaryotic replicating DNA polymerases and polymerases from phages T4 and RB69. Although they employ similar catalytic mechanism, these families of polymerases differ in substrate specificity, substrate analog-incorporating efficiency, degree and rate for primer extension, mode of DNA synthesis, exonuclease activity, and sensitivity against inhibitors.

[0383] DNA polymerases are also selected based on the optimum reaction conditions they require, such as reaction temperature, pH, and template and primer concentrations. Sometimes a combination of more than one DNA polymerases is employed to achieve the desired DNA fragment size and synthesis efficiency. For example, Cheng et al. increase pH, add glycerol and dimethyl sulfoxide, decrease denaturation times, increase extension times, and utilize a secondary thermostable DNA polymerase that possesses a 3′ to 5′ exonuclease activity to effectively amplify long targets from cloned inserts and human genomic DNA. (Cheng et al., PNAS 91:5695-5699 (1994), the contents of which are incorporated herein by reference in their entirety). RNA polymerases from bacteriophage T3, T7, and SP6 have been widely used to prepare RNAs for biochemical and biophysical studies. RNA polymerases, capping enzymes, and poly-A polymerases are disclosed in the co-pending International Publication No. WO2014/028429, the contents of which are incorporated herein by reference in their entirety.

[0384] In one aspect, the RNA polymerase which can be used in the synthesis of the polynucleotides of the present invention is a Syn5 RNA polymerase. (see Zhu et al. Nucleic Acids Research 2013, doi:10.1093/nar/gkt1193, which is herein incorporated by reference in its entirety). The Syn5 RNA polymerase was recently characterized from marine cyanophage Syn5 by Zhu et al. where they also identified the promoter sequence (see Zhu et al. Nucleic Acids Research 2013, the contents of which is herein incorporated by reference in its entirety). Zhu et al. found that Syn5 RNA polymerase catalyzed RNA synthesis over a wider range of temperatures and salinity as compared to T7 RNA polymerase. Additionally, the requirement for the initiating nucleotide at the promoter was found to be less stringent for Syn5 RNA polymerase as compared to the T7 RNA polymerase making Syn5 RNA polymerase promising for RNA synthesis.

[0385] In one aspect, a Syn5 RNA polymerase can be used in the synthesis of the polynucleotides described herein. As a non-limiting example, a Syn5 RNA polymerase can be used in the synthesis of the polynucleotide requiring a precise 3′-terminus.

[0386] In one aspect, a Syn5 promoter can be used in the synthesis of the polynucleotides. As a non-limiting example, the Syn5 promoter can be 5′-ATTGGGCACCCGTAAGGG-3′ (SEQ ID NO:185 as described by Zhu et al. (Nucleic Acids Research 2013).

[0387] In one aspect, a Syn5 RNA polymerase can be used in the synthesis of polynucleotides comprising at least one chemical modification described herein and/or known in the art (see e.g., the incorporation of pseudo-UTP and 5Me-CTP described in Zhu et al. Nucleic Acids Research 2013).

[0388] In one aspect, the polynucleotides described herein can be synthesized using a Syn5 RNA polymerase which has been purified using modified and improved purification procedure described by Zhu et al. (Nucleic Acids Research 2013).

[0389] Various tools in genetic engineering are based on the enzymatic amplification of a target gene which acts as a template. For the study of sequences of individual genes or specific regions of interest and other research needs, it is necessary to generate multiple copies of a target gene from a small sample of polynucleotides or nucleic acids. Such methods can be applied in the manufacture of the polynucleotides of the invention. For example, polymerase chain reaction (PCR), strand displacement amplification (SDA), nucleic acid sequence-based amplification (NASBA), also called transcription mediated amplification (TMA), and/or rolling-circle amplification (RCA) can be utilized in the manufacture of one or more regions of the polynucleotides of the present invention. Assembling polynucleotides or nucleic acids by a ligase is also widely used.

[0390] b. Chemical Synthesis

[0391] Standard methods can be applied to synthesize an isolated polynucleotide sequence encoding an isolated polypeptide of interest, such as a polynucleotide of the invention (e.g., a polynucleotide comprising a nucleotide sequence encoding a wound healing polypeptide). For example, a single DNA or RNA oligomer containing a codon-optimized nucleotide sequence coding for the particular isolated polypeptide can be synthesized. In other aspects, several small oligonucleotides coding for portions of the desired polypeptide can be synthesized and then ligated. In some aspects, the individual oligonucleotides typically contain 5′ or 3′ overhangs for complementary assembly.

[0392] A polynucleotide disclosed herein (e.g., a RNA, e.g., an mRNA) can be chemically synthesized using chemical synthesis methods and potential nucleobase substitutions known in the art. See, for example, International Publication Nos. WO2014093924, WO2013052523; WO2013039857, WO2012135805, WO2013151671; U.S. Publ. No. US20130115272; or U.S. Pat. Nos. U.S. Pat. Nos. 8,999,380 or 8,710,200, all of which are herein incorporated by reference in their entireties.

[0393] c. Purification of Polynucleotides Encoding a Wound Healing Polypeptide

[0394] Purification of the polynucleotides described herein (e.g., a polynucleotide comprising a nucleotide sequence encoding a wound healing polypeptide) can include, but is not limited to, polynucleotide clean-up, quality assurance and quality control. Clean-up can be performed by methods known in the arts such as, but not limited to, AGENCOURT® beads (Beckman Coulter Genomics, Danvers, Mass.), poly-T beads, LNA™ oligo-T capture probes (EXIQON® Inc., Vedbaek, Denmark) or HPLC based purification methods such as, but not limited to, strong anion exchange HPLC, weak anion exchange HPLC, reverse phase HPLC (RP-HPLC), and hydrophobic interaction HPLC (HIC-HPLC).

[0395] The term “purified” when used in relation to a polynucleotide such as a “purified polynucleotide” refers to one that is separated from at least one contaminant. As used herein, a “contaminant” is any substance that makes another unfit, impure or inferior. Thus, a purified polynucleotide (e.g., DNA and RNA) is present in a form or setting different from that in which it is found in nature, or a form or setting different from that which existed prior to subjecting it to a treatment or purification method.

[0396] In some embodiments, purification of a polynucleotide of the invention (e.g., a polynucleotide comprising a nucleotide sequence encoding a wound healing polypeptide) removes impurities that can reduce or remove an unwanted immune response, e.g., reducing cytokine activity.

[0397] In some embodiments, the polynucleotide of the invention (e.g., a polynucleotide comprising a nucleotide sequence encoding a wound healing polypeptide) is purified prior to administration using column chromatography (e.g., strong anion exchange HPLC, weak anion exchange HPLC, reverse phase HPLC (RP-HPLC), and hydrophobic interaction HPLC (HIC-HPLC), or (LCMS)).

[0398] In some embodiments, the polynucleotide of the invention (e.g., a polynucleotide comprising a nucleotide sequence encoding a wound healing polypeptide) purified using column chromatography (e.g., strong anion exchange HPLC, weak anion exchange HPLC, reverse phase HPLC (RP-HPLC, hydrophobic interaction HPLC (HIC-HPLC), or (LCMS)) presents increased expression of the encoded wound healing protein compared to the expression level obtained with the same polynucleotide of the present disclosure purified by a different purification method.

[0399] In some embodiments, a column chromatography (e.g., strong anion exchange HPLC, weak anion exchange HPLC, reverse phase HPLC (RP-HPLC), hydrophobic interaction HPLC (HIC-HPLC), or (LCMS)) purified polynucleotide comprises a nucleotide sequence encoding a wound healing polypeptide comprising one or more of the point mutations known in the art.

[0400] In some embodiments, the use of RP-HPLC purified polynucleotide increases protein expression levels of the wound healing polypeptide in cells when introduced into those cells, e.g., by 10-100%, i.e., at least about 10%, at least about 20%, at least about 25%, at least about 30%, at least about 35%, at least about 40%, at least about 45%, at least about 50%, at least about 55%, at least about 60%, at least about 65%, at least about 70%, at least about 75%, at least about 80%, at least about 90%, at least about 95%, or at least about 100% with respect to the expression levels of the wound healing protein in the cells before the RP-HPLC purified polynucleotide was introduced in the cells, or after a non-RP-HPLC purified polynucleotide was introduced in the cells.

[0401] In some embodiments, the use of RP-HPLC purified polynucleotide increases functional wound healing protein expression levels in cells when introduced into those cells, e.g., by 10-100%, i.e., at least about 10%, at least about 20%, at least about 25%, at least about 30%, at least about 35%, at least about 40%, at least about 45%, at least about 50%, at least about 55%, at least about 60%, at least about 65%, at least about 70%, at least about 75%, at least about 80%, at least about 90%, at least about 95%, or at least about 100% with respect to the functional expression levels of wound healing protein in the cells before the RP-HPLC purified polynucleotide was introduced in the cells, or after a non-RP-HPLC purified polynucleotide was introduced in the cells.

[0402] In some embodiments, the use of RP-HPLC purified polynucleotide increases detectable would healing polypeptide activity in cells when introduced into those cells, e.g., by 10-100%, i.e., at least about 10%, at least about 20%, at least about 25%, at least about 30%, at least about 35%, at least about 40%, at least about 45%, at least about 50%, at least about 55%, at least about 60%, at least about 65%, at least about 70%, at least about 75%, at least about 80%, at least about 90%, at least about 95%, or at least about 100% with respect to the activity levels of functional wound healing polypeptide in the cells before the RP-HPLC purified polynucleotide was introduced in the cells, or after a non-RP-HPLC purified polynucleotide was introduced in the cells.

[0403] In some embodiments, the purified polynucleotide is at least about 80% pure, at least about 85% pure, at least about 90% pure, at least about 95% pure, at least about 96% pure, at least about 97% pure, at least about 98% pure, at least about 99% pure, or about 100% pure.

[0404] A quality assurance and/or quality control check can be conducted using methods such as, but not limited to, gel electrophoresis, UV absorbance, or analytical HPLC. In another embodiment, the polynucleotide can be sequenced by methods including, but not limited to reverse-transcriptase-PCR.

[0405] d. Quantification of Expressed Polynucleotides Encoding a Wound Healing Polypeptide

[0406] In some embodiments, the polynucleotides of the present invention (e.g., a polynucleotide comprising a nucleotide sequence encoding a wound healing polypeptide), their expression products, as well as degradation products and metabolites can be quantified according to methods known in the art.

[0407] In some embodiments, the polynucleotides of the present invention can be quantified in exosomes or when derived from one or more bodily fluid. As used herein “bodily fluids” include peripheral blood, serum, plasma, ascites, urine, cerebrospinal fluid (CSF), sputum, saliva, bone marrow, synovial fluid, aqueous humor, amniotic fluid, cerumen, breast milk, broncheoalveolar lavage fluid, semen, prostatic fluid, cowper's fluid or pre-ejaculatory fluid, sweat, fecal matter, hair, tears, cyst fluid, pleural and peritoneal fluid, pericardial fluid, lymph, chyme, chyle, bile, interstitial fluid, menses, pus, sebum, vomit, vaginal secretions, mucosal secretion, stool water, pancreatic juice, lavage fluids from sinus cavities, bronchopulmonary aspirates, blastocyl cavity fluid, and umbilical cord blood. Alternatively, exosomes can be retrieved from an organ selected from the group consisting of lung, heart, pancreas, stomach, intestine, bladder, kidney, ovary, testis, skin, colon, breast, prostate, brain, esophagus, liver, and placenta.

[0408] In the exosome quantification method, a sample of not more than 2 mL is obtained from the subject and the exosomes isolated by size exclusion chromatography, density gradient centrifugation, differential centrifugation, nanomembrane ultrafiltration, immunoabsorbent capture, affinity purification, microfluidic separation, or combinations thereof. In the analysis, the level or concentration of a polynucleotide can be an expression level, presence, absence, truncation or alteration of the administered construct. It is advantageous to correlate the level with one or more clinical phenotypes or with an assay for a human disease biomarker.

[0409] The assay can be performed using construct specific probes, cytometry, qRT-PCR, real-time PCR, PCR, flow cytometry, electrophoresis, mass spectrometry, or combinations thereof while the exosomes can be isolated using immunohistochemical methods such as enzyme linked immunosorbent assay (ELISA) methods. Exosomes can also be isolated by size exclusion chromatography, density gradient centrifugation, differential centrifugation, nanomembrane ultrafiltration, immunoabsorbent capture, affinity purification, microfluidic separation, or combinations thereof.

[0410] These methods afford the investigator the ability to monitor, in real time, the level of polynucleotides remaining or delivered. This is possible because the polynucleotides of the present invention differ from the endogenous forms due to the structural or chemical modifications.

[0411] In some embodiments, the polynucleotide can be quantified using methods such as, but not limited to, ultraviolet visible spectroscopy (UV/Vis). A non-limiting example of a UV/Vis spectrometer is a NANODROP® spectrometer (ThermoFisher, Waltham, Mass.). The quantified polynucleotide can be analyzed in order to determine if the polynucleotide can be of proper size, check that no degradation of the polynucleotide has occurred. Degradation of the polynucleotide can be checked by methods such as, but not limited to, agarose gel electrophoresis, HPLC based purification methods such as, but not limited to, strong anion exchange HPLC, weak anion exchange HPLC, reverse phase HPLC (RP-HPLC), and hydrophobic interaction HPLC (HIC-HPLC), liquid chromatography-mass spectrometry (LCMS), capillary electrophoresis (CE) and capillary gel electrophoresis (CGE).

### 19. PHARMACEUTICAL COMPOSITIONS AND FORMULATIONS

[0412] The present invention provides pharmaceutical compositions and formulations that comprise any of the polynucleotides described above. In some embodiments, the composition or formulation further comprises a delivery agent.

[0413] In some embodiments, the composition or formulation can contain a polynucleotide comprising a sequence optimized nucleic acid sequence disclosed herein which encodes a wound healing polypeptide. In some embodiments, the composition or formulation can contain a polynucleotide (e.g., a RNA, e.g., an mRNA) comprising a polynucleotide (e.g., an ORF) having significant sequence identity to a sequence optimized nucleic acid sequence disclosed herein which encodes a wound healing polypeptide. In some embodiments, the polynucleotide further comprises a miRNA binding site, e.g., a miRNA binding site that binds miR-126, miR-142, miR-144, miR-146, miR-150, miR-155, miR-16, miR-21, miR-223, miR-24, miR-27 and miR-26a.

[0414] Pharmaceutical compositions or formulation can optionally comprise one or more additional active substances, e.g., therapeutically and/or prophylactically active substances. Pharmaceutical compositions or formulation of the present invention can be sterile and/or pyrogen-free. General considerations in the formulation and/or manufacture of pharmaceutical agents can be found, for example, in Remington: The Science and Practice of Pharmacy 21^{st} ed., Lippincott Williams & Wilkins, 2005 (incorporated herein by reference in its entirety). In some embodiments, compositions are administered to humans, human patients or subjects. For the purposes of the present disclosure, the phrase “active ingredient” generally refers to polynucleotides to be delivered as described herein.

[0415] Formulations and pharmaceutical compositions described herein can be prepared by any method known or hereafter developed in the art of pharmacology. In general, such preparatory methods include the step of associating the active ingredient with an excipient and/or one or more other accessory ingredients, and then, if necessary and/or desirable, dividing, shaping and/or packaging the product into a desired single- or multi-dose unit.

[0416] A pharmaceutical composition or formulation in accordance with the present disclosure can be prepared, packaged, and/or sold in bulk, as a single unit dose, and/or as a plurality of single unit doses. As used herein, a “unit dose” refers to a discrete amount of the pharmaceutical composition comprising a predetermined amount of the active ingredient. The amount of the active ingredient is generally equal to the dosage of the active ingredient that would be administered to a subject and/or a convenient fraction of such a dosage such as, for example, one-half or one-third of such a dosage.

[0417] Relative amounts of the active ingredient, the pharmaceutically acceptable excipient, and/or any additional ingredients in a pharmaceutical composition in accordance with the present disclosure can vary, depending upon the identity, size, and/or condition of the subject being treated and further depending upon the route by which the composition is to be administered.

[0418] In some embodiments, the compositions and formulations described herein can contain at least one polynucleotide of the invention. As a non-limiting example, the composition or formulation can contain 1, 2, 3, 4 or 5 polynucleotides of the invention. In some embodiments, the compositions or formulations described herein can comprise more than one type of polynucleotide. In some embodiments, the composition or formulation can comprise a polynucleotide in linear and circular form. In another embodiment, the composition or formulation can comprise a circular polynucleotide and an in vitro transcribed (IVT) polynucleotide. In yet another embodiment, the composition or formulation can comprise an IVT polynucleotide, a chimeric polynucleotide and a circular polynucleotide.

[0419] Although the descriptions of pharmaceutical compositions and formulations provided herein are principally directed to pharmaceutical compositions and formulations that are suitable for intradermal (e.g., using microneedles) or topical administration to humans, it will be understood by the skilled artisan that such compositions are generally suitable for intradermal (e.g., using microneedles) or intradermal (e.g., using microneedles) or topical administration to any other animal, e.g., to non-human animals, e.g. non-human mammals.

[0420] The present invention provides pharmaceutical formulations that comprise a polynucleotide described herein (e.g., a polynucleotide comprising a nucleotide sequence encoding a wound healing polypeptide). The polynucleotides described herein can be formulated using one or more excipients to: (1) increase stability; (2) increase cell transfection; (3) permit the sustained or delayed release (e.g., from a depot formulation of the polynucleotide); (4) alter the biodistribution (e.g., target the polynucleotide to specific tissues or cell types); (5) increase the translation of encoded protein in vivo; and/or (6) alter the release profile of encoded protein in vivo. In some embodiments, the pharmaceutical formulation further comprises a delivery agent comprising, e.g., a compound having the Formula (I), e.g., any of Compounds 1-232, e.g., Compound II; a compound having the Formula (III), (IV), (V), or (VI), e.g., any of Compounds 233-342, e.g., Compound VI; or a compound having the Formula (VIII), e.g., any of Compounds 419-428, e.g., Compound I, or any combination thereof. In some embodiments, the delivery agent comprises Compound II, DSPC, Cholesterol, and Compound I or PEG-DMG, e.g., with a mole ratio of about 50:10:38.5:1.5. In some embodiments, the delivery agent comprises Compound II, DSPC, Cholesterol, and Compound I or PEG-DMG, e.g., with a mole ratio of about 47.5:10.5:39.0:3.0. In some embodiments, the delivery agent comprises Compound VI, DSPC, Cholesterol, and Compound I or PEG-DMG, e.g., with a mole ratio of about 50:10:38.5:1.5. In some embodiments, the delivery agent comprises Compound VI, DSPC, Cholesterol, and Compound I or PEG-DMG, e.g., with a mole ratio of about 47.5:10.5:39.0:3.0.

[0421] A pharmaceutically acceptable excipient, as used herein, includes, but are not limited to, any and all solvents, dispersion media, or other liquid vehicles, dispersion or suspension aids, diluents, granulating and/or dispersing agents, surface active agents, isotonic agents, thickening or emulsifying agents, preservatives, binders, lubricants or oil, coloring, sweetening or flavoring agents, stabilizers, antioxidants, antimicrobial or antifungal agents, osmolality adjusting agents, pH adjusting agents, buffers, chelants, cyoprotectants, and/or bulking agents, as suited to the particular dosage form desired. Various excipients for formulating pharmaceutical compositions and techniques for preparing the composition are known in the art (see Remington: The Science and Practice of Pharmacy, 21st Edition, A. R. Gennaro (Lippincott, Williams & Wilkins, Baltimore, Md., 2006; incorporated herein by reference in its entirety).

[0422] Exemplary diluents include, but are not limited to, calcium or sodium carbonate, calcium phosphate, calcium hydrogen phosphate, sodium phosphate, lactose, sucrose, cellulose, microcrystalline cellulose, kaolin, mannitol, sorbitol, etc., and/or combinations thereof.

[0423] Exemplary granulating and/or dispersing agents include, but are not limited to, starches, pregelatinized starches, or microcrystalline starch, alginic acid, guar gum, agar, poly(vinyl-pyrrolidone), (providone), cross-linked poly(vinyl-pyrrolidone) (crospovidone), cellulose, methylcellulose, carboxymethyl cellulose, cross-linked sodium carboxymethyl cellulose (croscarmellose), magnesium aluminum silicate (VEEGUM®), sodium lauryl sulfate, etc., and/or combinations thereof.

[0424] Exemplary surface active agents and/or emulsifiers include, but are not limited to, natural emulsifiers (e.g., acacia, agar, alginic acid, sodium alginate, tragacanth, chondrux, cholesterol, xanthan, pectin, gelatin, egg yolk, casein, wool fat, cholesterol, wax, and lecithin), sorbitan fatty acid esters (e.g., polyoxyethylene sorbitan monooleate [TWEEN®80], sorbitan monopalmitate [SPAN®40], glyceryl monooleate, polyoxyethylene esters, polyethylene glycol fatty acid esters (e.g., CREMOPHOR®), polyoxyethylene ethers (e.g., polyoxyethylene lauryl ether [BRIJ®30]), PLUORINC®F 68, POLOXAMER®188, etc. and/or combinations thereof.

[0425] Exemplary binding agents include, but are not limited to, starch, gelatin, sugars (e.g., sucrose, glucose, dextrose, dextrin, molasses, lactose, lactitol, mannitol), amino acids (e.g., glycine), natural and synthetic gums (e.g., acacia, sodium alginate), ethylcellulose, hydroxyethylcellulose, hydroxypropyl methylcellulose, etc., and combinations thereof.

[0426] Oxidation is a potential degradation pathway for mRNA, especially for liquid mRNA formulations. In order to prevent oxidation, antioxidants can be added to the formulations. Exemplary antioxidants include, but are not limited to, alpha tocopherol, ascorbic acid, ascorbyl palmitate, benzyl alcohol, butylated hydroxyanisole, m-cresol, methionine, butylated hydroxytoluene, monothioglycerol, sodium or potassium metabisulfite, propionic acid, propyl gallate, sodium ascorbate, etc., and combinations thereof.

[0427] Exemplary chelating agents include, but are not limited to, ethylenediaminetetraacetic acid (EDTA), citric acid monohydrate, disodium edetate, fumaric acid, malic acid, phosphoric acid, sodium edetate, tartaric acid, trisodium edetate, etc., and combinations thereof.

[0428] Exemplary antimicrobial or antifungal agents include, but are not limited to, benzalkonium chloride, benzethonium chloride, methyl paraben, ethyl paraben, propyl paraben, butyl paraben, benzoic acid, hydroxybenzoic acid, potassium or sodium benzoate, potassium or sodium sorbate, sodium propionate, sorbic acid, etc., and combinations thereof.

[0429] Exemplary preservatives include, but are not limited to, vitamin A, vitamin C, vitamin E, beta-carotene, citric acid, ascorbic acid, butylated hydroxyanisol, ethylenediamine, sodium lauryl sulfate (SLS), sodium lauryl ether sulfate (SLES), etc., and combinations thereof.

[0430] In some embodiments, the pH of polynucleotide solutions is maintained between pH 5 and pH 8 to improve stability. Exemplary buffers to control pH can include, but are not limited to sodium phosphate, sodium citrate, sodium succinate, histidine (or histidine-HCl), sodium malate, sodium carbonate, etc., and/or combinations thereof.

[0431] Exemplary lubricating agents include, but are not limited to, magnesium stearate, calcium stearate, stearic acid, silica, talc, malt, hydrogenated vegetable oils, polyethylene glycol, sodium benzoate, sodium or magnesium lauryl sulfate, etc., and combinations thereof.

[0432] The pharmaceutical composition or formulation described here can contain a cryoprotectant to stabilize a polynucleotide described herein during freezing. Exemplary cryoprotectants include, but are not limited to mannitol, sucrose, trehalose, lactose, glycerol, dextrose, etc., and combinations thereof.

[0433] The pharmaceutical composition or formulation described here can contain a bulking agent in lyophilized polynucleotide formulations to yield a “pharmaceutically elegant” cake, stabilize the lyophilized polynucleotides during long term (e.g., 36 month) storage. Exemplary bulking agents of the present invention can include, but are not limited to sucrose, trehalose, mannitol, glycine, lactose, raffinose, and combinations thereof.

[0434] In some embodiments, the pharmaceutical composition or formulation further comprises a delivery agent. The delivery agent of the present disclosure can include, without limitation, liposomes, lipid nanoparticles, lipidoids, polymers, lipoplexes, microvesicles, exosomes, peptides, proteins, cells transfected with polynucleotides, hyaluronidase, nanoparticle mimics, nanotubes, conjugates, and combinations thereof.

### 20. DELIVERY AGENTS

[0435] a. Lipid Compound

[0436] The present disclosure provides pharmaceutical compositions with advantageous properties. The lipid compositions described herein may be advantageously used in lipid nanoparticle compositions for the delivery of therapeutic and/or prophylactic agents, e.g., mRNAs, to mammalian cells or organs. For example, the lipids described herein have little or no immunogenicity. For example, the lipid compounds disclosed herein have a lower immunogenicity as compared to a reference lipid (e.g., MC3, KC2, or DLinDMA). For example, a formulation comprising a lipid disclosed herein and a therapeutic or prophylactic agent, e.g., mRNA, has an increased therapeutic index as compared to a corresponding formulation which comprises a reference lipid (e.g., MC3, KC2, or DLinDMA) and the same therapeutic or prophylactic agent.

[0437] In certain embodiments, the present application provides pharmaceutical compositions comprising:

[0438] (a) a polynucleotide comprising a nucleotide sequence encoding a wound healing polypeptide; and

[0439] (b) a delivery agent.

### Lipid Nanoparticle Formulations

[0440] In some embodiments, nucleic acids of the invention (e.g., mRNA encoding a wound healing polypeptide) are formulated in a lipid nanoparticle (LNP). Lipid nanoparticles typically comprise ionizable cationic lipid, non-cationic lipid, sterol and PEG lipid components along with the nucleic acid cargo of interest. The lipid nanoparticles of the invention can be generated using components, compositions, and methods as are generally known in the art, see for example PCT/US2016/052352; PCT/US2016/068300; PCT/US2017/037551; PCT/US2015/027400; PCT/US2016/047406; PCT/US2016000129; PCT/US2016/014280; PCT/US2016/014280; PCT/US2017/038426; PCT/US2014/027077; PCT/US2014/055394; PCT/US2016/52117; PCT/US2012/069610; PCT/US2017/027492; PCT/US2016/059575 and PCT/US2016/069491 all of which are incorporated by reference herein in their entirety.

[0441] Nucleic acids of the present disclosure (e.g., mRNA encoding a wound healing polypeptide) are typically formulated in lipid nanoparticle. In some embodiments, the lipid nanoparticle comprises at least one ionizable cationic lipid, at least one non-cationic lipid, at least one sterol, and/or at least one polyethylene glycol (PEG)-modified lipid.

[0442] In some embodiments, the lipid nanoparticle comprises a molar ratio of 20-60% ionizable cationic lipid. For example, the lipid nanoparticle may comprise a molar ratio of 20-50%, 20-40%, 20-30%, 30-60%, 30-50%, 30-40%, 40-60%, 40-50%, or 50-60% ionizable cationic lipid. In some embodiments, the lipid nanoparticle comprises a molar ratio of 20%, 30%, 40%, 50, or 60% ionizable cationic lipid.

[0443] In some embodiments, the lipid nanoparticle comprises a molar ratio of 5-25% non-cationic lipid. For example, the lipid nanoparticle may comprise a molar ratio of 5-20%, 5-15%, 5-10%, 10-25%, 10-20%, 10-25%, 15-25%, 15-20%, or 20-25% non-cationic lipid. In some embodiments, the lipid nanoparticle comprises a molar ratio of 5%, 10%, 15%, 20%, or 25% non-cationic lipid.

[0444] In some embodiments, the lipid nanoparticle comprises a molar ratio of 25-55% sterol. For example, the lipid nanoparticle may comprise a molar ratio of 25-50%, 25-45%, 25-40%, 25-35%, 25-30%, 30-55%, 30-50%, 30-45%, 30-40%, 30-35%, 35-55%, 35-50%, 35-45%, 35-40%, 40-55%, 40-50%, 40-45%, 45-55%, 45-50%, or 50-55% sterol. In some embodiments, the lipid nanoparticle comprises a molar ratio of 25%, 30%, 35%, 40%, 45%, 50%, or 55% sterol.

[0445] In some embodiments, the lipid nanoparticle comprises a molar ratio of 0.5-15% PEG-modified lipid. For example, the lipid nanoparticle may comprise a molar ratio of 0.5-10%, 0.5-5%, 1-15%, 1-10%, 1-5%, 2-15%, 2-10%, 2-5%, 5-15%, 5-10%, or 10-15%. In some embodiments, the lipid nanoparticle comprises a molar ratio of 0.5%, 1%, 2%, 3%, 4%, 5%, 6%, 7%, 8%, 9%, 10%, 11%, 12%, 13%, 14%, or 15% PEG-modified lipid.

[0446] In some embodiments, the lipid nanoparticle comprises a molar ratio of 20-60% ionizable cationic lipid, 5-25% non-cationic lipid, 25-55% sterol, and 0.5-15% PEG-modified lipid.

### Ionizable Lipids

[0447] In some aspects, the ionizable lipids of the present disclosure may be one or more of compounds of Formula (I):

[chemical structure]

or their N-oxides, or salts or isomers thereof, wherein:
R₁ is selected from the group consisting of C5-30 alkyl, C₅₋₂₀ alkenyl, —R*YR″, —YR″, and —R″M′R′;
R₂ and R₃ are independently selected from the group consisting of H, C₁₋₁₄ alkyl, C₂₋₁₄ alkenyl, —R*YR″, —YR″, and —R*OR″, or R₂ and R₃, together with the atom to which they are attached, form a heterocycle or carbocycle;
R₄ is selected from the group consisting of hydrogen, a C₃₋₆ carbocycle, —(CH₂)ₙQ, —(CH₂)ₙCHQR, —CHQR, —CQ(R)₂, and unsubstituted C₁₋₆ alkyl, where Q is selected from a carbocycle, heterocycle, —OR, —O(CH₂)ₙN(R)₂, —C(O)OR, —OC(O)R, —CX₃, —CX₂H, —CXH₂, —CN, —N(R)₂, —C(O)N(R)₂, —N(R)C(O)R, —N(R)S(O)₂R, —N(R)C(O)N(R)₂, —N(R)C(S)N(R)₂, —N(R)R₈,
—N(R)S(O)₂R₈, —O(CH₂)ₙOR, —N(R)C(═NR₉)N(R)₂, —N(R)C(═CHR₉)N(R)₂, —OC(O)N(R)₂, —N(R)C(O)OR, —N(OR)C(O)R, —N(OR)S(O)₂R, —N(OR)C(O)OR, —N(OR)C(O)N(R)₂, —N(OR)C(S)N(R)₂, —N(OR)C(═NR₉)N(R)₂, —N(OR)C(═CHR₉)N(R)₂, —C(═NR₉)N(R)₂, —C(═NR₉)R, —C(O)N(R)OR, and —C(R)N(R)₂C(O)OR, and each n is independently selected from 1, 2, 3, 4, and 5;
each R₅ is independently selected from the group consisting of C₁₋₃ alkyl, C₂₋₃ alkenyl, and H;
each R₆ is independently selected from the group consisting of C₁₋₃ alkyl, C₂₋₃ alkenyl, and H; M and M′ are independently selected
from —C(O)O—, —OC(O)—, —OC(O)-M″-C(O)O—, —C(O)N(R′)—,
—N(R′)C(O)—, —C(O)—, —C(S)—, —C(S)S—, —SC(S)—, —CH(OH)—, —P(O)(OR′)O—, —S(O)₂—, —S—S—, an aryl group, and a heteroaryl group, in which M″ is a bond, C₁₋₁₃ alkyl or C₂₋₁₃ alkenyl;
R₇ is selected from the group consisting of C₁₋₃ alkyl, C₂₋₃ alkenyl, and H;
R₈ is selected from the group consisting of C₃₋₆ carbocycle and heterocycle;
R₉ is selected from the group consisting of H, CN, NO₂, C₁₋₆ alkyl, —OR, —S(O)₂R, —S(O)₂N(R)₂, C₂₋₆ alkenyl, C₃₋₆ carbocycle and heterocycle;
each R is independently selected from the group consisting of C₁₋₃ alkyl, C₂₋₃ alkenyl, and H;
each R′ is independently selected from the group consisting of C₁₋₁₈ alkyl, C₂₋₁₈ alkenyl, —R*YR″, —YR″, and H;
each R″ is independently selected from the group consisting of C₃₋₁₅ alkyl and C₃₋₁₅ alkenyl;
each R* is independently selected from the group consisting of C₁₋₁₂ alkyl and C₂₋₁₂ alkenyl;
each Y is independently a C₃₋₆ carbocycle;
each X is independently selected from the group consisting of F, Cl, Br, and I; and
m is selected from 5, 6, 7, 8, 9, 10, 11, 12, and 13; and wherein when R₄ is —(CH₂)ₙQ, —(CH₂)ₙCHQR, —CHQR, or —CQ(R)₂, then (i) Q is not —N(R)₂ when n is 1, 2, 3, 4 or 5, or (ii) Q is not 5, 6, or 7-membered heterocycloalkyl when n is 1 or 2.

[0448] In certain embodiments, a subset of compounds of Formula (I) includes those of Formula (IA):

[chemical structure]

or its N-oxide, or a salt or isomer thereof, wherein 1 is selected from 1, 2, 3, 4, and 5; m is selected from 5, 6, 7, 8, and 9; M₁ is a bond or M′; R₄ is hydrogen, unsubstituted C₁₋₃ alkyl, or —(CH₂)ₙQ, in which Q is OH, —NHC(S)N(R)₂, —NHC(O)N(R)₂, —N(R)C(O)R, —N(R)S(O)₂R, —N(R)R₈, —NHC(═NR₉)N(R)₂, —NHC(═CHR₉)N(R)₂, —OC(O)N(R)₂, —N(R)C(O)OR, heteroaryl or heterocycloalkyl; M and M′ are independently selected from —C(O)O—, —OC(O)—, —OC(O)-M″-C(O)O—, —C(O)N(R′)—, —P(O)(OR′)O—, —S—S—, an aryl group, and a heteroaryl group; and R₂ and R₃ are independently selected from the group consisting of H, C₁₋₁₄ alkyl, and C₂₋₁₄ alkenyl. For example, m is 5, 7, or 9. For example, Q is OH, —NHC(S)N(R)₂, or —NHC(O)N(R)₂. For example, Q is —N(R)C(O)R, or —N(R)S(O)₂R.

[0449] In certain embodiments, a subset of compounds of Formula (I) includes those of Formula (IB):

[chemical structure]

or its N-oxide, or a salt or isomer thereof in which all variables are as defined herein. For example, m is selected from 5, 6, 7, 8, and 9; R₄ is hydrogen, unsubstituted C₁₋₃ alkyl, or —(CH₂)ₙQ, in which Q is OH, —NHC(S)N(R)₂, —NHC(O)N(R)₂, —N(R)C(O)R, —N(R)S(O)₂R, —N(R)R₈, —NHC(═NR₉)N(R)₂, —NHC(═CHR₉)N(R)₂, —OC(O)N(R)₂, —N(R)C(O)OR, heteroaryl or heterocycloalkyl; M and M′ are independently selected from —C(O)O—, —OC(O)—, —OC(O)-M″-C(O)O—, —C(O)N(R′)—, —P(O)(OR′)O—, —S—S—, an aryl group, and a heteroaryl group; and R₂ and R₃ are independently selected from the group consisting of H, C₁₋₁₄ alkyl, and C₂₋₁₄ alkenyl. For example, m is 5, 7, or 9. For example, Q is OH, —NHC(S)N(R)₂, or —NHC(O)N(R)₂. For example, Q is —N(R)C(O)R, or —N(R)S(O)₂R.

[0450] In certain embodiments, a subset of compounds of Formula (I) includes those of Formula (II):

[chemical structure]

or its N-oxide, or a salt or isomer thereof, wherein 1 is selected from 1, 2, 3, 4, and 5; M₁ is a bond or M′; R₄ is hydrogen, unsubstituted C₁₋₃ alkyl, or —(CH₂)ₙQ, in which n is 2, 3, or 4, and Q is OH, —NHC(S)N(R)₂, —NHC(O)N(R)₂, —N(R)C(O)R, —N(R)S(O)₂R, —N(R)R₈, —NHC(═NR₉)N(R)₂, —NHC(═CHR₉)N(R)₂, —OC(O)N(R)₂, —N(R)C(O)OR, heteroaryl or heterocycloalkyl; M and M′ are independently selected from —C(O)O—, —OC(O)—, —OC(O)-M″-C(O)O—, —C(O)N(R′)—, —P(O)(OR′)O—, —S—S—, an aryl group, and a heteroaryl group; and R₂ and R₃ are independently selected from the group consisting of H, C₁₋₁₄ alkyl, and C₂₋₁₄ alkenyl.

[0451] In one embodiment, the compounds of Formula (I) are of Formula (IIa),

[chemical structure]

or their N-oxides, or salts or isomers thereof, wherein R₄ is as described herein.

[0452] In another embodiment, the compounds of Formula (I) are of Formula (IIb),

[chemical structure]

or their N-oxides, or salts or isomers thereof, wherein R₄ is as described herein.

[0453] In another embodiment, the compounds of Formula (I) are of Formula (IIc) or (IIe):

[chemical structure]

or their N-oxides, or salts or isomers thereof, wherein R₄ is as described herein.

[0454] In another embodiment, the compounds of Formula (I) are of Formula (IIf):

[chemical structure]

or their N-oxides, or salts or isomers thereof, wherein M is —C(O)O— or —OC(O)—, M″ is C₁₋₆ alkyl or C₂₋₆ alkenyl, R₂ and R₃ are independently selected from the group consisting of C₅₋₁₄ alkyl and C₅₋₁₄ alkenyl, and n is selected from 2, 3, and 4.

[0455] In a further embodiment, the compounds of Formula (I) are of Formula (IId),

[chemical structure]

or their N-oxides, or salts or isomers thereof, wherein n is 2, 3, or 4; and m, R′, R″, and R₂ through R₆ are as described herein. For example, each of R₂ and R₃ may be independently selected from the group consisting of C₅₋₁₄ alkyl and C₅₋₁₄ alkenyl.

[0456] In a further embodiment, the compounds of Formula (I) are of Formula (IIg),

[chemical structure]

or their N-oxides, or salts or isomers thereof, wherein 1 is selected from 1, 2, 3, 4, and 5; m is selected from 5, 6, 7, 8, and 9; M₁ is a bond or M′; M and M′ are independently selected from
—C(O)O—, —OC(O)—, —OC(O)-M″-C(O)O—, —C(O)N(R′)—, —P(O)(OR′)O—, —S—S—, an aryl group, and a heteroaryl group; and R₂ and R₃ are independently selected from the group consisting of H, C₁₋₁₄ alkyl, and C₂₋₁₄ alkenyl. For example, M″ is C₁₋₆ alkyl (e.g., C₁₋₄ alkyl) or C₂₋₆ alkenyl (e.g. C₂₄ alkenyl). For example, R₂ and R₃ are independently selected from the group consisting of C₅₋₁₄ alkyl and C₅₋₁₄ alkenyl.

[0457] In some embodiments, the ionizable lipids are one or more of the compounds described in U.S. Application Nos. 62/220,091, 62/252,316, 62/253,433, 62/266,460, 62/333,557, 62/382,740, 62/393,940, 62/471,937, 62/471,949, 62/475,140, and 62/475,166, and PCT Application No. PCT/US2016/052352.

[0458] In some embodiments, the ionizable lipids are selected from Compounds 1-280 described in U.S. Application No. 62/475,166.

[0459] In some embodiments, the ionizable lipid is

[chemical structure]

or a salt thereof.

[0460] In some embodiments, the ionizable lipid is

[chemical structure]

or a salt thereof.

[0461] In some embodiments, the ionizable lipid is

[chemical structure]

or a salt thereof.

[0462] In some embodiments, the ionizable lipid is

[chemical structure]

or a salt thereof.

[0463] The central amine moiety of a lipid according to Formula (I), (IA), (IB), (II), (IIa), (IIb), (IIc), (IId), (IIe), (IIf), or (IIg) may be protonated at a physiological pH. Thus, a lipid may have a positive or partial positive charge at physiological pH. Such lipids may be referred to as cationic or ionizable (amino)lipids. Lipids may also be zwitterionic, i.e., neutral molecules having both a positive and a negative charge.

[0464] In some aspects, the ionizable lipids of the present disclosure may be one or more of compounds of formula (III),

[chemical structure]

or salts or isomers thereof, wherein

[0465] W is

[chemical structure]

[0466] ring A is

[chemical structure]

[0467] t is 1 or 2;

[0468] A₁ and A₂ are each independently selected from CH or N;

[0469] Z is CH₂ or absent wherein when Z is CH₂, the dashed lines (1) and (2) each represent a single bond; and when Z is absent, the dashed lines (1) and (2) are both absent;

[0470] R₁, R₂, R₃, R₄, and R₅ are independently selected from the group consisting of C₅₋₂₀ alkyl, C₅₋₂₀ alkenyl, —R″MR′, —R*YR″, —YR″, and —R*OR″;

[0471] R_{X1} and R_{X2} are each independently H or C₁₋₃ alkyl;

[0472] each M is independently selected from the group consisting

### of —C(O)O—, —OC(O)—, —OC(O)O—, —C(O)N(R′)—, —N(R′)C(O)—, —C(O)—, —C(S)—, —C(S)S—, —SC(S)—,

[0473] —CH(OH)—, —P(O)(OR′)O—, —S(O)₂—, —C(O)S—, —SC(O)—, an aryl group, and a heteroaryl group;

[0474] M* is C₁-C₆ alkyl,

[0475] W¹ and W² are each independently selected from the group consisting of —O— and —N(R₆)—;

[0476] each R₆ is independently selected from the group consisting of H and C₁₋₅ alkyl;

[0477] X¹, X², and X³ are independently selected from the group consisting of a bond, —CH₂—, —(CH₂)₂—, —CHR—, —CHY—, —C(O)—, —C(O)O—, —OC(O)—, —(CH₂)n-C(O)—, —C(O)—(CH₂)ₙ—, —(CH₂)ₙ—C(O)O—, —OC(O)—(CH₂)ₙ—, —(CH₂)ₙ—OC(O)—, —C(O)O—(CH₂)ₙ—, —CH(OH)—, —C(S)—, and —CH(SH)—;

[0478] each Y is independently a C₃₋₆ carbocycle;

[0479] each R* is independently selected from the group consisting of C₁₋₁₂ alkyl and C₂₋₁₂ alkenyl;

[0480] each R is independently selected from the group consisting of C₁₋₃ alkyl and a C₃₋₆ carbocycle;

[0481] each R′ is independently selected from the group consisting of C₁₋₁₂ alkyl, C₂₋₁₂ alkenyl, and H;

[0482] each R″ is independently selected from the group consisting of C₃₋₁₂ alkyl, C₃₋₁₂ alkenyl and —R*MR′; and

[0483] n is an integer from 1-6;

[0484] when ring A is

[chemical structure]

then

[0485] i) at least one of X¹, X², and X³ is not —CH₂—; and/or

[0486] ii) at least one of R₁, R₂, R₃, R₄, and R₅ is —R″MR′.

[0487] In some embodiments, the compound is of any of formulae (IIIa1)-(IIIa8):

[chemical structure]

[0488] In some embodiments, the ionizable lipids are one or more of the compounds described in U.S. Application Nos. 62/271,146, 62/338,474, 62/413,345, and 62/519,826, and PCT Application No. PCT/US2016/068300.

[0489] In some embodiments, the ionizable lipids are selected from Compounds 1-156 described in U.S. Application No. 62/519,826.

[0490] In some embodiments, the ionizable lipids are selected from Compounds 1-16, 42-66, 68-76, and 78-156 described in U.S. Application No. 62/519,826.

[0491] In some embodiments, the ionizable lipid is

[chemical structure]

or a salt thereof.

[0492] In some embodiments, the ionizable lipid is
[0493] (Compound VII), or a salt thereof.

[0494] The central amine moiety of a lipid according to Formula (III), (IIIa1), (IIIa2), (IIIa3), (IIIa4), (IIIa5), (IIIa6), (IIIa7), or (IIIa8) may be protonated at a physiological pH. Thus, a lipid may have a positive or partial positive charge at physiological pH. Such lipids may be referred to as cationic or ionizable (amino)lipids. Lipids may also be zwitterionic, i.e., neutral molecules having both a positive and a negative charge.

### Phospholipids

[0495] The lipid composition of the lipid nanoparticle composition disclosed herein can comprise one or more phospholipids, for example, one or more saturated or (poly)unsaturated phospholipids or a combination thereof. In general, phospholipids comprise a phospholipid moiety and one or more fatty acid moieties.

[0496] A phospholipid moiety can be selected, for example, from the non-limiting group consisting of phosphatidyl choline, phosphatidyl ethanolamine, phosphatidyl glycerol, phosphatidyl serine, phosphatidic acid, 2-lysophosphatidyl choline, and a sphingomyelin.

[0497] A fatty acid moiety can be selected, for example, from the non-limiting group consisting of lauric acid, myristic acid, myristoleic acid, palmitic acid, palmitoleic acid, stearic acid, oleic acid, linoleic acid, alpha-linolenic acid, erucic acid, phytanoic acid, arachidic acid, arachidonic acid, eicosapentaenoic acid, behenic acid, docosapentaenoic acid, and docosahexaenoic acid.

[0498] Particular phospholipids can facilitate fusion to a membrane. For example, a cationic phospholipid can interact with one or more negatively charged phospholipids of a membrane (e.g., a cellular or intracellular membrane). Fusion of a phospholipid to a membrane can allow one or more elements (e.g., a therapeutic agent) of a lipid-containing composition (e.g., LNPs) to pass through the membrane permitting, e.g., delivery of the one or more elements to a target tissue.

[0499] Non-natural phospholipid species including natural species with modifications and substitutions including branching, oxidation, cyclization, and alkynes are also contemplated. For example, a phospholipid can be functionalized with or cross-linked to one or more alkynes (e.g., an alkenyl group in which one or more double bonds is replaced with a triple bond). Under appropriate reaction conditions, an alkyne group can undergo a copper-catalyzed cycloaddition upon exposure to an azide. Such reactions can be useful in functionalizing a lipid bilayer of a nanoparticle composition to facilitate membrane permeation or cellular recognition or in conjugating a nanoparticle composition to a useful component such as a targeting or imaging moiety (e.g., a dye).

[0500] Phospholipids include, but are not limited to, glycerophospholipids such as phosphatidylcholines, phosphatidylethanolamines, phosphatidylserines, phosphatidylinositols, phosphatidyl glycerols, and phosphatidic acids. Phospholipids also include phosphosphingolipid, such as sphingomyelin.

[0501] In some embodiments, a phospholipid of the invention comprises 1,2-distearoyl-sn-glycero-3-phosphocholine (DSPC), 1,2-dioleoyl-sn-glycero-3-phosphoethanolamine (DOPE), 1,2-dilinoleoyl-sn-glycero-3-phosphocholine (DLPC), 1,2-dimyristoyl-sn-gly cero-phosphocholine (DMPC), 1,2-dioleoyl-sn-glycero-3-phosphocholine (DOPC), 1,2-dipalmitoyl-sn-glycero-3-phosphocholine (DPPC), 1,2-diundecanoyl-sn-glycero-phosphocholine (DUPC), 1-palmitoyl-2-oleoyl-sn-glycero-3-phosphocholine (POPC), 1,2-di-O-octadecenyl-sn-glycero-3-phosphocholine (18:0 Diether PC), 1-oleoyl-2 cholesterylhemisuccinoyl-sn-glycero-3-phosphocholine (OChemsPC), 1-hexadecyl-sn-glycero-3-phosphocholine (C16 Lyso PC), 1,2-dilinolenoyl-sn-glycero-3-phosphocholine,1,2-diarachidonoyl-sn-glycero-3-phosphocholine, 1,2-didocosahexaenoyl-sn-glycero-3-phosphocholine, 1,2-diphytanoyl-sn-glycero-3-phosphoethanolamine (ME 16.0 PE), 1,2-distearoyl-sn-glycero-3-phosphoethanolamine, 1,2-dilinoleoyl-sn-glycero-3-phosphoethanolamine, 1,2-dilinolenoyl-sn-glycero-3-phosphoethanolamine, 1,2-diarachidonoyl-sn-glycero-3-phosphoethanolamine, 1,2-didocosahexaenoyl-sn-glycero-3-phosphoethanolamine, 1,2-dioleoyl-sn-glycero-3-phospho-rac-(1-glycerol) sodium salt (DOPG), sphingomyelin, and mixtures thereof.

[0502] In certain embodiments, a phospholipid useful or potentially useful in the present invention is an analog or variant of DSPC. In certain embodiments, a phospholipid useful or potentially useful in the present invention is a compound of Formula (IV):

[chemical structure]

or a salt thereof, wherein:

[0503] each R¹ is independently optionally substituted alkyl; or optionally two R¹ are joined together with the intervening atoms to form optionally substituted monocyclic carbocyclyl or optionally substituted monocyclic heterocyclyl; or optionally three R¹ are joined together with the intervening atoms to form optionally substituted bicyclic carbocyclyl or optionally substitute bicyclic heterocyclyl;

[0504] n is 1, 2, 3, 4, 5, 6, 7, 8, 9, or 10;

[0505] m is 0, 1, 2, 3, 4, 5, 6, 7, 8, 9, or 10;

[0506] A is of the formula:

[chemical structure]

[0507] each instance of L² is independently a bond or optionally substituted C₁₋₆ alkylene, wherein one methylene unit of the optionally substituted C₁₋₆ alkylene is optionally replaced with O, N(R^{N}), S, C(O), C(O)N(R^{N}), NR^{N}C(O), C(O)O, OC(O), OC(O)O, OC(O)N(R^{N}), —NR^{N}C(O)O, or NR^{N}C(O)N(R^{N});

[0508] each instance of R² is independently optionally substituted C₁₋₃₀ alkyl, optionally substituted C₁₋₃₀ alkenyl, or optionally substituted C₁₋₃₀ alkynyl; optionally wherein one or more methylene units of R² are independently replaced with optionally substituted carbocyclylene, optionally substituted heterocyclylene, optionally substituted arylene, optionally substituted heteroarylene, N(R^{N}), O, S, C(O), C(O)N(R^{N}), NR^{N}C(O), —NR^{N}C(O)N(R^{N}), C(O)O, OC(O), OC(O)O, OC(O)N(R^{N}), NR^{N}C(O)O, C(O)S, SC(O), —C(═NR^{N}), C(═NR^{N})N(R^{N}), NR^{N}C(═NR^{N}), NR^{N}C(═NR^{N})N(R^{N}), C(S), C(S)N(R^{N}), NR^{N}C(S), NR^{N}C(S)N(R^{N}), S(O), OS(O), S(O)O, OS(O)O, OS(O)₂, S(O)₂O, OS(O)₂O, N(R^{N})S(O), —S(O)N(R^{N}), N(R^{N})S(O)N(R^{N}), OS(O)N(R^{N}), N(R^{N})S(O)O, S(O)₂, N(R^{N})S(O)₂, S(O)₂N(R^{N}), N(R^{N})S(O)₂N(R^{N}), OS(O)₂N(R^{N}), or N(R^{N})S(O)₂O;

[0509] each instance of R^{N} is independently hydrogen, optionally substituted alkyl, or a nitrogen protecting group;

[0510] Ring B is optionally substituted carbocyclyl, optionally substituted heterocyclyl, optionally substituted aryl, or optionally substituted heteroaryl; and

[0511] p is 1 or 2;

[0512] provided that the compound is not of the formula:

[chemical structure]

[0513] wherein each instance of R² is independently unsubstituted alkyl, unsubstituted alkenyl, or unsubstituted alkynyl.

[0514] In some embodiments, the phospholipids may be one or more of the phospholipids described in U.S. Application No. 62/520,530.

### i) Phospholipid Head Modifications

[0515] In certain embodiments, a phospholipid useful or potentially useful in the present invention comprises a modified phospholipid head (e.g., a modified choline group). In certain embodiments, a phospholipid with a modified head is DSPC, or analog thereof, with a modified quaternary amine. For example, in embodiments of Formula (IV), at least one of R¹ is not methyl. In certain embodiments, at least one of R₁ is not hydrogen or methyl. In certain embodiments, the compound of Formula (IV) is one of the following formulae:

[chemical structure]

or a salt thereof, wherein:

[0516] each t is independently 1, 2, 3, 4, 5, 6, 7, 8, 9, or 10;

[0517] each u is independently 0, 1, 2, 3, 4, 5, 6, 7, 8, 9, or 10; and

[0518] each v is independently 1, 2, or 3.

[0519] In certain embodiments, a compound of Formula (IV) is of Formula (IV-a):

[chemical structure]

or a salt thereof.

[0520] In certain embodiments, a phospholipid useful or potentially useful in the present invention comprises a cyclic moiety in place of the glyceride moiety. In certain embodiments, a phospholipid useful in the present invention is DSPC, or analog thereof, with a cyclic moiety in place of the glyceride moiety. In certain embodiments, the compound of Formula (IV) is of Formula (IV-b):

[chemical structure]

or a salt thereof.

### (ii) Phospholipid Tail Modifications

[0521] In certain embodiments, a phospholipid useful or potentially useful in the present invention comprises a modified tail. In certain embodiments, a phospholipid useful or potentially useful in the present invention is DSPC, or analog thereof, with a modified tail. As described herein, a “modified tail” may be a tail with shorter or longer aliphatic chains, aliphatic chains with branching introduced, aliphatic chains with substituents introduced, aliphatic chains wherein one or more methylenes are replaced by cyclic or heteroatom groups, or any combination thereof. For example, in certain embodiments, the compound of (IV) is of Formula (IV-a), or a salt thereof, wherein at least one instance of R² is each instance of R² is optionally substituted C₁₋₃₀ alkyl, wherein one or more methylene units of R² are independently replaced with optionally substituted carbocyclylene, optionally substituted heterocyclylene, optionally substituted arylene, optionally substituted heteroarylene, N(R^{N}), O, S, —C(O), C(O)N(R^{N}), NR^{N}C(O), NR^{N}C(O)N(R^{N}), C(O)O, OC(O), OC(O)O, —OC(O)N(R^{N}), NR^{N}C(O)O, C(O)S, SC(O), C(═NR^{N}), C(═NR^{N})N(R^{N}), NR^{N}C(═NR^{N}), NR^{N}C(═NR^{N})N(R^{N}), C(S), C(S)N(R^{N}), NR^{N}C(S), NR^{N}C(S)N(R^{N}), S(O), OS(O), —S(O)O, OS(O)O, OS(O)₂, S(O)₂O, OS(O)₂O, N(R^{N})S(O), S(O)N(R^{N}), —N(R^{N})S(O)N(R^{N}), OS(O)N(R^{N}), N(R^{N})S(O)O, S(O)₂, N(R^{N})S(O)₂, S(O)₂N(R^{N}), —N(R^{N})S(O)₂N(R^{N}), OS(O)₂N(R^{N}), or N(R^{N})S(O)₂O.

[0522] In certain embodiments, the compound of Formula (IV) is of Formula (IV-c):

[chemical structure]

or a salt thereof, wherein:

[0523] each x is independently an integer between 0-30, inclusive; and

[0524] each instance is G is independently selected from the group consisting of optionally substituted carbocyclylene, optionally substituted heterocyclylene, optionally substituted arylene, optionally substituted heteroarylene, N(R^{N}), O, S, C(O), C(O)N(R^{N}), NR^{N}C(O), —NR^{N}C(O)N(R^{N}), C(O)O, OC(O), OC(O)O, OC(O)N(R^{N}), NR^{N}C(O)O, C(O)S, SC(O), —C(═NR^{N}), C(═NR^{N})N(R^{N}), NR^{N}C(═NR^{N}), NR^{N}C(═NR^{N})N(R^{N}), C(S), C(S)N(R^{N}), NR^{N}C(S), NR^{N}C(S)N(R^{N}), S(O), OS(O), S(O)O, OS(O)O, OS(O)₂, S(O)₂O, OS(O)₂O, N(R^{N})S(O), —S(O)N(R^{N}), N(R^{N})S(O)N(R^{N}), OS(O)N(R^{N}), N(R^{N})S(O)O, S(O)₂, N(R^{N})S(O)₂, S(O)₂N(R^{N}), N(R^{N})S(O)₂N(R^{N}), OS(O)₂N(R^{N}), or N(R^{N})S(O)₂O. Each possibility represents a separate embodiment of the present invention.

[0525] In certain embodiments, a phospholipid useful or potentially useful in the present invention comprises a modified phosphocholine moiety, wherein the alkyl chain linking the quaternary amine to the phosphoryl group is not ethylene (e.g., n is not 2). Therefore, in certain embodiments, a phospholipid useful or potentially useful in the present invention is a compound of Formula (IV), wherein n is 1, 3, 4, 5, 6, 7, 8, 9, or 10. For example, in certain embodiments, a compound of Formula (IV) is of one of the following formulae:

[chemical structure]

or a salt thereof

### Alternative Lipids

[0526] In certain embodiments, a phospholipid useful or potentially useful in the present invention comprises a modified phosphocholine moiety, wherein the alkyl chain linking the quaternary amine to the phosphoryl group is not ethylene (e.g., n is not 2). Therefore, in certain embodiments, a phospholipid useful.

[0527] In certain embodiments, an alternative lipid is used in place of a phospholipid of the present disclosure.

[0528] In certain embodiments, an alternative lipid of the invention is oleic acid.

[0529] In certain embodiments, the alternative lipid is one of the following:

[chemical structure]

### Structural Lipids

[0530] The lipid composition of a pharmaceutical composition disclosed herein can comprise one or more structural lipids. As used herein, the term “structural lipid” refers to sterols and also to lipids containing sterol moieties.

[0531] Incorporation of structural lipids in the lipid nanoparticle may help mitigate aggregation of other lipids in the particle. Structural lipids can be selected from the group including but not limited to, cholesterol, fecosterol, sitosterol, ergosterol, campesterol, stigmasterol, brassicasterol, tomatidine, tomatine, ursolic acid, alpha-tocopherol, hopanoids, phytosterols, steroids, and mixtures thereof. In some embodiments, the structural lipid is a sterol. As defined herein, “sterols” are a subgroup of steroids consisting of steroid alcohols. In certain embodiments, the structural lipid is a steroid. In certain embodiments, the structural lipid is cholesterol. In certain embodiments, the structural lipid is an analog of cholesterol. In certain embodiments, the structural lipid is alpha-tocopherol.

[0532] In some embodiments, the structural lipids may be one or more of the structural lipids described in U.S. Application No. 62/520,530.

### Polyethylene Glycol (PEG)-Lipids

[0533] The lipid composition of a pharmaceutical composition disclosed herein can comprise one or more a polyethylene glycol (PEG) lipid.

[0534] As used herein, the term “PEG-lipid” refers to polyethylene glycol (PEG)-modified lipids. Non-limiting examples of PEG-lipids include PEG-modified phosphatidylethanolamine and phosphatidic acid, PEG-ceramide conjugates (e.g., PEG-CerC14 or PEG-CerC20), PEG-modified dialkylamines and PEG-modified 1,2-diacyloxypropan-3-amines. Such lipids are also referred to as PEGylated lipids. For example, a PEG lipid can be PEG-c-DOMG, PEG-DMG, PEG-DLPE, PEG-DMPE, PEG-DPPC, or a PEG-DSPE lipid.

[0535] In some embodiments, the PEG-lipid includes, but not limited to 1,2-dimyristoyl-sn-glycerol methoxypolyethylene glycol (PEG-DMG), 1,2-distearoyl-sn-glycero-3-phosphoethanolamine-N-[amino(polyethylene glycol)] (PEG-DSPE), PEG-disteryl glycerol (PEG-DSG), PEG-dipalmetoleyl, PEG-dioleyl, PEG-distearyl, PEG-diacylglycamide (PEG-DAG), PEG-dipalmitoyl phosphatidylethanolamine (PEG-DPPE), or PEG-1,2-dimyristyloxlpropyl-3-amine (PEG-c-DMA).

[0536] In one embodiment, the PEG-lipid is selected from the group consisting of a PEG-modified phosphatidylethanolamine, a PEG-modified phosphatidic acid, a PEG-modified ceramide, a PEG-modified dialkylamine, a PEG-modified diacylglycerol, a PEG-modified dialkylglycerol, and mixtures thereof.

[0537] In some embodiments, the lipid moiety of the PEG-lipids includes those having lengths of from about C₁₄ to about C₂₂, preferably from about C₁₄ to about C₁₆. In some embodiments, a PEG moiety, for example an mPEG-NH₂, has a size of about 1000, 2000, 5000, 10,000, 15,000 or 20,000 daltons. In one embodiment, the PEG-lipid is PEG₂ₖ-DMG.

[0538] In one embodiment, the lipid nanoparticles described herein can comprise a PEG lipid which is a non-diffusible PEG. Non-limiting examples of non-diffusible PEGs include PEG-DSG and PEG-DSPE.

[0539] PEG-lipids are known in the art, such as those described in U.S. Pat. No. 8,158,601 and International Publ. No. WO 2015/130584 A2, which are incorporated herein by reference in their entirety.

[0540] In general, some of the other lipid components (e.g., PEG lipids) of various formulae, described herein may be synthesized as described International Patent Application No. PCT/US2016/000129, filed Dec. 10, 2016, entitled “Compositions and Methods for Delivery of Therapeutic Agents,” which is incorporated by reference in its entirety.

[0541] The lipid component of a lipid nanoparticle composition may include one or more molecules comprising polyethylene glycol, such as PEG or PEG-modified lipids. Such species may be alternately referred to as PEGylated lipids. A PEG lipid is a lipid modified with polyethylene glycol. A PEG lipid may be selected from the non-limiting group including PEG-modified phosphatidylethanolamines, PEG-modified phosphatidic acids, PEG-modified ceramides, PEG-modified dialkylamines, PEG-modified diacylglycerols, PEG-modified dialkylglycerols, and mixtures thereof. For example, a PEG lipid may be PEG-c-DOMG, PEG-DMG, PEG-DLPE, PEG-DMPE, PEG-DPPC, or a PEG-DSPE lipid.

[0542] In some embodiments the PEG-modified lipids are a modified form of PEG DMG. PEG-DMG has the following structure:

[chemical structure]

[0543] In one embodiment, PEG lipids useful in the present invention can be PEGylated lipids described in International Publication No. WO2012099755, the contents of which is herein incorporated by reference in its entirety. Any of these exemplary PEG lipids described herein may be modified to comprise a hydroxyl group on the PEG chain. In certain embodiments, the PEG lipid is a PEG-OH lipid. As generally defined herein, a “PEG-OH lipid” (also referred to herein as “hydroxy-PEGylated lipid”) is a PEGylated lipid having one or more hydroxyl (—OH) groups on the lipid. In certain embodiments, the PEG-OH lipid includes one or more hydroxyl groups on the PEG chain. In certain embodiments, a PEG-OH or hydroxy-PEGylated lipid comprises an —OH group at the terminus of the PEG chain. Each possibility represents a separate embodiment of the present invention.

[0544] In certain embodiments, a PEG lipid useful in the present invention is a compound of Formula (V). Provided herein are compounds of Formula (V):

[chemical structure]

or salts thereof, wherein:

[0545] R³ is —OR^{O};

[0546] R^{O} is hydrogen, optionally substituted alkyl, or an oxygen protecting group;

[0547] r is an integer between 1 and 100, inclusive;

[0548] L¹ is optionally substituted C₁₋₁₀ alkylene, wherein at least one methylene of the optionally substituted C₁₋₁₀ alkylene is independently replaced with optionally substituted carbocyclylene, optionally substituted heterocyclylene, optionally substituted arylene, optionally substituted heteroarylene, O, N(R^{N}), S, C(O), C(O)N(R^{N}), NR^{N}C(O), C(O)O, —OC(O), OC(O)O, OC(O)N(R^{N}), NR^{N}C(O)O, or NR^{N}C(O)N(R^{N});

[0549] D is a moiety obtained by click chemistry or a moiety cleavable under physiological conditions;

[0550] m is 0, 1, 2, 3, 4, 5, 6, 7, 8, 9, or 10;

[0551] A is of the formula:

[chemical structure]

[0552] each instance of L² is independently a bond or optionally substituted C₁₋₆ alkylene, wherein one methylene unit of the optionally substituted C₁₋₆ alkylene is optionally replaced with O, N(R^{N}), S, C(O), C(O)N(R^{N}), NR^{N}C(O), C(O)O, OC(O), OC(O)O, OC(O)N(R^{N}), —NR^{N}C(O)O, or NR^{N}C(O)N(R^{N});

[0553] each instance of R² is independently optionally substituted C₁₋₃₀ alkyl, optionally substituted C₁₋₃₀ alkenyl, or optionally substituted C₁₋₃₀ alkynyl; optionally wherein one or more methylene units of R² are independently replaced with optionally substituted carbocyclylene, optionally substituted heterocyclylene, optionally substituted arylene, optionally substituted heteroarylene, N(R^{N}), O, S, C(O), C(O)N(R^{N}), NR^{N}C(O), —NR^{N}C(O)N(R^{N}), C(O)O, OC(O), OC(O)O, OC(O)N(R^{N}), NR^{N}C(O)O, C(O)S, SC(O), —C(═NR^{N}), C(═NR^{N})N(R^{N}), NR^{N}C(═NR^{N}), NR^{N}C(═NR^{N})N(R^{N}), C(S), C(S)N(R^{N}), NR^{N}C(S), NR^{N}C(S)N(R^{N}), S(O), OS(O), S(O)O, OS(O)O, OS(O)₂, S(O)₂O, OS(O)₂O, N(R^{N})S(O), —S(O)N(R^{N}), N(R^{N})S(O)N(R^{N}), OS(O)N(R^{N}), N(R^{N})S(O)O, S(O)₂, N(R^{N})S(O)₂, S(O)₂N(R^{N}), N(R^{N})S(O)₂N(R^{N}), OS(O)₂N(R^{N}), or N(R^{N})S(O)₂O;

[0554] each instance of R^{N} is independently hydrogen, optionally substituted alkyl, or a nitrogen protecting group;

[0555] Ring B is optionally substituted carbocyclyl, optionally substituted heterocyclyl, optionally substituted aryl, or optionally substituted heteroaryl; and

[0556] p is 1 or 2.

[0557] In certain embodiments, the compound of Formula (V) is a PEG-OH lipid (i.e., R³ is —OR^{O}, and R^{O} is hydrogen). In certain embodiments, the compound of Formula (V) is of Formula (V-OH):

[chemical structure]

or a salt thereof.

[0558] In certain embodiments, a PEG lipid useful in the present invention is a PEGylated fatty acid. In certain embodiments, a PEG lipid useful in the present invention is a compound of Formula (VI). Provided herein are compounds of Formula (VI):

[chemical structure]

or a salts thereof, wherein:

[0559] R³ is —OR^{O};

[0560] R^{O} is hydrogen, optionally substituted alkyl or an oxygen protecting group;

[0561] r is an integer between 1 and 100, inclusive;

[0562] R⁵ is optionally substituted C₁₀₋₄₀ alkyl, optionally substituted C₁₀₋₄₀ alkenyl, or optionally substituted C₁₀₋₄₀ alkynyl; and optionally one or more methylene groups of R⁵ are replaced with optionally substituted carbocyclylene, optionally substituted heterocyclylene, optionally substituted arylene, optionally substituted heteroarylene, N(R^{N}), O, S, C(O), —C(O)N(R^{N}), NR^{N}C(O), NR^{N}C(O)N(R^{N}), C(O)O, OC(O), OC(O)O, OC(O)N(R^{N}), —NR^{N}C(O)O, C(O)S, SC(O), C(═NR^{N}), C(═NR^{N})N(R^{N}), NR^{N}C(═NR^{N}), NR^{N}C(═NR^{N})N(R^{N}), C(S), C(S)N(R^{N}), NR^{N}C(S), NR^{N}C(S)N(R^{N}), S(O), OS(O), S(O)O, OS(O)O, OS(O)₂, —S(O)₂O, OS(O)₂O, N(R^{N})S(O), S(O)N(R^{N}), N(R^{N})S(O)N(R^{N}), OS(O)N(R^{N}), N(R^{N})S(O)O, S(O)₂, N(R^{N})S(O)₂, S(O)₂N(R^{N}), N(R^{N})S(O)₂N(R^{N}), OS(O)₂N(R^{N}), or N(R^{N})S(O)₂O; and each instance of R^{N} is independently hydrogen, optionally substituted alkyl, or a nitrogen protecting group.

[0563] In certain embodiments, the compound of Formula (VI) is of Formula (VI-OH):

[chemical structure]

or a salt thereof. In some embodiments, r is 45.

[0564] In yet other embodiments the compound of Formula (VI) is:

[chemical structure]

or a salt thereof.

[0565] In one embodiment, the compound of Formula (VI) is

[chemical structure]

[0566] In some aspects, the lipid composition of the pharmaceutical compositions disclosed herein does not comprise a PEG-lipid.

[0567] In some embodiments, the PEG-lipids may be one or more of the PEG lipids described in U.S. Application No. 62/520,530.

[0568] In some embodiments, a PEG lipid of the invention comprises a PEG-modified phosphatidylethanolamine, a PEG-modified phosphatidic acid, a PEG-modified ceramide, a PEG-modified dialkylamine, a PEG-modified diacylglycerol, a PEG-modified dialkylglycerol, and mixtures thereof. In some embodiments, the PEG-modified lipid is PEG-DMG, PEG-c-DOMG (also referred to as PEG-DOMG), PEG-DSG and/or PEG-DPG.

[0569] In some embodiments, a LNP of the invention comprises an ionizable cationic lipid of any of Formula I, II or III, a phospholipid comprising DSPC, a structural lipid, and a PEG lipid comprising PEG-DMG.

[0570] In some embodiments, a LNP of the invention comprises an ionizable cationic lipid of any of Formula I, II or III, a phospholipid comprising DSPC, a structural lipid, and a PEG lipid comprising a compound having Formula VI.

[0571] In some embodiments, a LNP of the invention comprises an ionizable cationic lipid of Formula I, II or III, a phospholipid comprising a compound having Formula IV, a structural lipid, and the PEG lipid comprising a compound having Formula V or VI.

[0572] In some embodiments, a LNP of the invention comprises an ionizable cationic lipid of Formula I, II or III, a phospholipid comprising a compound having Formula IV, a structural lipid, and the PEG lipid comprising a compound having Formula V or VI.

[0573] In some embodiments, a LNP of the invention comprises an ionizable cationic lipid of Formula I, II or III, a phospholipid having Formula IV, a structural lipid, and a PEG lipid comprising a compound having Formula VI.

[0574] In some embodiments, a LNP of the invention comprises an ionizable cationic lipid of

[chemical structure]

and a PEG lipid comprising Formula VI.

[0575] In some embodiments, a LNP of the invention comprises an ionizable cationic lipid of

[chemical structure]

and an alternative lipid comprising oleic acid.

[0576] In some embodiments, a LNP of the invention comprises an ionizable cationic lipid of

[chemical structure]

an alternative lipid comprising oleic acid, a structural lipid comprising cholesterol, and a PEG lipid comprising a compound having Formula VI.

[0577] In some embodiments, a LNP of the invention comprises an ionizable cationic lipid of

[chemical structure]

a phospholipid comprising DOPE, a structural lipid comprising cholesterol, and a PEG lipid comprising a compound having Formula VI.

[0578] In some embodiments, a LNP of the invention comprises an ionizable cationic lipid of a phospholipid comprising DOPE, a structural lipid comprising cholesterol, and a PEG lipid comprising a compound having Formula VII.

[0579] In some embodiments, a LNP of the invention comprises an N:P ratio of from about 2:1 to about 30:1.

[0580] In some embodiments, a LNP of the invention comprises an N:P ratio of about 6:1.

[0581] In some embodiments, a LNP of the invention comprises an N:P ratio of about 3:1.

[0582] In some embodiments, a LNP of the invention comprises a wt/wt ratio of the ionizable cationic lipid component to the RNA of from about 10:1 to about 100:1.

[0583] In some embodiments, a LNP of the invention comprises a wt/wt ratio of the ionizable cationic lipid component to the RNA of about 20:1.

[0584] In some embodiments, a LNP of the invention comprises a wt/wt ratio of the ionizable cationic lipid component to the RNA of about 10:1.

[0585] In some embodiments, a LNP of the invention has a mean diameter from about 50 nm to about 150 nm.

[0586] In some embodiments, a LNP of the invention has a mean diameter from about 70 nm to about 120 nm.

[0587] In some embodiments, a LNP of the invention has a mean diameter from about 70 nm to about 85 nm.

[0588] As used herein, the term “alkyl”, “alkyl group”, or “alkylene” means a linear or branched, saturated hydrocarbon including one or more carbon atoms (e.g., one, two, three, four, five, six, seven, eight, nine, ten, eleven, twelve, thirteen, fourteen, fifteen, sixteen, seventeen, eighteen, nineteen, twenty, or more carbon atoms), which is optionally substituted. The notation “C₁₋₁₄ alkyl” means an optionally substituted linear or branched, saturated hydrocarbon including 1 14 carbon atoms. Unless otherwise specified, an alkyl group described herein refers to both unsubstituted and substituted alkyl groups.

[0589] As used herein, the term “alkenyl”, “alkenyl group”, or “alkenylene” means a linear or branched hydrocarbon including two or more carbon atoms (e.g., two, three, four, five, six, seven, eight, nine, ten, eleven, twelve, thirteen, fourteen, fifteen, sixteen, seventeen, eighteen, nineteen, twenty, or more carbon atoms) and at least one double bond, which is optionally substituted. The notation “C2-14 alkenyl” means an optionally substituted linear or branched hydrocarbon including 2 14 carbon atoms and at least one carbon-carbon double bond. An alkenyl group may include one, two, three, four, or more carbon-carbon double bonds. For example, C18 alkenyl may include one or more double bonds. A C18 alkenyl group including two double bonds may be a linoleyl group. Unless otherwise specified, an alkenyl group described herein refers to both unsubstituted and substituted alkenyl groups.

[0590] As used herein, the term “alkynyl”, “alkynyl group”, or “alkynylene” means a linear or branched hydrocarbon including two or more carbon atoms (e.g., two, three, four, five, six, seven, eight, nine, ten, eleven, twelve, thirteen, fourteen, fifteen, sixteen, seventeen, eighteen, nineteen, twenty, or more carbon atoms) and at least one carbon-carbon triple bond, which is optionally substituted. The notation “C2-14 alkynyl” means an optionally substituted linear or branched hydrocarbon including 2 14 carbon atoms and at least one carbon-carbon triple bond. An alkynyl group may include one, two, three, four, or more carbon-carbon triple bonds. For example, C₁₈ alkynyl may include one or more carbon-carbon triple bonds. Unless otherwise specified, an alkynyl group described herein refers to both unsubstituted and substituted alkynyl groups.

[0591] As used herein, the term “carbocycle” or “carbocyclic group” means an optionally substituted mono- or multi-cyclic system including one or more rings of carbon atoms. Rings may be three, four, five, six, seven, eight, nine, ten, eleven, twelve, thirteen, fourteen, fifteen, sixteen, seventeen, eighteen, nineteen, or twenty membered rings. The notation “C3-6 carbocycle” means a carbocycle including a single ring having 3-6 carbon atoms. Carbocycles may include one or more carbon-carbon double or triple bonds and may be non-aromatic or aromatic (e.g., cycloalkyl or aryl groups). Examples of carbocycles include cyclopropyl, cyclopentyl, cyclohexyl, phenyl, naphthyl, and 1,2 dihydronaphthyl groups. The term “cycloalkyl” as used herein means a non-aromatic carbocycle and may or may not include any double or triple bond. Unless otherwise specified, carbocycles described herein refers to both unsubstituted and substituted carbocycle groups, i.e., optionally substituted carbocycles.

[0592] As used herein, the term “heterocycle” or “heterocyclic group” means an optionally substituted mono- or multi-cyclic system including one or more rings, where at least one ring includes at least one heteroatom. Heteroatoms may be, for example, nitrogen, oxygen, or sulfur atoms. Rings may be three, four, five, six, seven, eight, nine, ten, eleven, twelve, thirteen, or fourteen membered rings. Heterocycles may include one or more double or triple bonds and may be non-aromatic or aromatic (e.g., heterocycloalkyl or heteroaryl groups). Examples of heterocycles include imidazolyl, imidazolidinyl, oxazolyl, oxazolidinyl, thiazolyl, thiazolidinyl, pyrazolidinyl, pyrazolyl, isoxazolidinyl, isoxazolyl, isothiazolidinyl, isothiazolyl, morpholinyl, pyrrolyl, pyrrolidinyl, furyl, tetrahydrofuryl, thiophenyl, pyridinyl, piperidinyl, quinolyl, and isoquinolyl groups. The term “heterocycloalkyl” as used herein means a non-aromatic heterocycle and may or may not include any double or triple bond. Unless otherwise specified, heterocycles described herein refers to both unsubstituted and substituted heterocycle groups, i.e., optionally substituted heterocycles.

[0593] As used herein, the term “heteroalkyl”, “heteroalkenyl”, or “heteroalkynyl”, refers respectively to an alkyl, alkenyl, alkynyl group, as defined herein, which further comprises one or more (e.g., 1, 2, 3, or 4) heteroatoms (e.g., oxygen, sulfur, nitrogen, boron, silicon, phosphorus) wherein the one or more heteroatoms is inserted between adjacent carbon atoms within the parent carbon chain and/or one or more heteroatoms is inserted between a carbon atom and the parent molecule, i.e., between the point of attachment. Unless otherwise specified, heteroalkyls, heteroalkenyls, or heteroalkynyls described herein refers to both unsubstituted and substituted heteroalkyls, heteroalkenyls, or heteroalkynyls, i.e., optionally substituted heteroalkyls, heteroalkenyls, or heteroalkynyls.

[0594] As used herein, a “biodegradable group” is a group that may facilitate faster metabolism of a lipid in a mammalian entity. A biodegradable group may be selected from the group consisting of, but is not limited to, —C(O)O—, —OC(O)—, —C(O)N(R′)—, —N(R′)C(O)—, —C(O)—, —C(S)—, —C(S)S—, —SC(S)—, —CH(OH)—, —P(O)(OR′)O—, —S(O)₂—, an aryl group, and a heteroaryl group. As used herein, an “aryl group” is an optionally substituted carbocyclic group including one or more aromatic rings. Examples of aryl groups include phenyl and naphthyl groups. As used herein, a “heteroaryl group” is an optionally substituted heterocyclic group including one or more aromatic rings. Examples of heteroaryl groups include pyrrolyl, furyl, thiophenyl, imidazolyl, oxazolyl, and thiazolyl. Both aryl and heteroaryl groups may be optionally substituted. For example, M and M′ can be selected from the non-limiting group consisting of optionally substituted phenyl, oxazole, and thiazole. In the formulas herein, M and M′ can be independently selected from the list of biodegradable groups above. Unless otherwise specified, aryl or heteroaryl groups described herein refers to both unsubstituted and substituted groups, i.e., optionally substituted aryl or heteroaryl groups.

[0595] Alkyl, alkenyl, and cyclyl (e.g., carbocyclyl and heterocyclyl) groups may be optionally substituted unless otherwise specified. Optional substituents may be selected from the group consisting of, but are not limited to, a halogen atom (e.g., a chloride, bromide, fluoride, or iodide group), a carboxylic acid (e.g., C(O)OH), an alcohol (e.g., a hydroxyl, OH), an ester (e.g., C(O)OR OC(O)R), an aldehyde (e.g., C(O)H), a carbonyl (e.g., C(O)R, alternatively represented by C═O), an acyl halide (e.g., C(O)X, in which X is a halide selected from bromide, fluoride, chloride, and iodide), a carbonate (e.g., OC(O)OR), an alkoxy (e.g., OR), an acetal (e.g., C(OR)2R″″, in which each OR are alkoxy groups that can be the same or different and R“ ” is an alkyl or alkenyl group), a phosphate (e.g., P(O)43-), a thiol (e.g., SH), a sulfoxide (e.g., S(O)R), a sulfinic acid (e.g., S(O)OH), a sulfonic acid (e.g., S(O)2OH), a thial (e.g., C(S)H), a sulfate (e.g., S(O)42-), a sulfonyl (e.g., S(O)2), an amide (e.g., C(O)NR2, or N(R)C(O)R), an azido (e.g., N3), a nitro (e.g., NO2), a cyano (e.g., CN), an isocyano (e.g., NC), an acyloxy (e.g., OC(O)R), an amino (e.g., NR₂, NRH, or NH2), a carbamoyl (e.g., OC(O)NR₂, OC(O)NRH, or OC(O)NH2), a sulfonamide (e.g., S(O)2NR2, S(O)2NRH, S(O)2NH2, N(R)S(O)2R, N(H)S(O)2R, N(R)S(O)2H, or N(H)S(O)2H), an alkyl group, an alkenyl group, and a cyclyl (e.g., carbocyclyl or heterocyclyl) group. In any of the preceding, R is an alkyl or alkenyl group, as defined herein. In some embodiments, the substituent groups themselves may be further substituted with, for example, one, two, three, four, five, or six substituents as defined herein. For example, a C1 6 alkyl group may be further substituted with one, two, three, four, five, or six substituents as described herein.

[0596] Compounds of the disclosure that contain nitrogens can be converted to N-oxides by treatment with an oxidizing agent (e.g., 3-chloroperoxybenzoic acid (mCPBA) and/or hydrogen peroxides) to afford other compounds of the disclosure. Thus, all shown and claimed nitrogen-containing compounds are considered, when allowed by valency and structure, to include both the compound as shown and its N-oxide derivative (which can be designated as N□O or N+—O—). Furthermore, in other instances, the nitrogens in the compounds of the disclosure can be converted to N-hydroxy or N-alkoxy compounds. For example, N-hydroxy compounds can be prepared by oxidation of the parent amine by an oxidizing agent such as m CPBA. All shown and claimed nitrogen-containing compounds are also considered, when allowed by valency and structure, to cover both the compound as shown and its N-hydroxy (i.e., N—OH) and N-alkoxy (i.e., N—OR, wherein R is substituted or unsubstituted C1-C 6 alkyl, C1-C6 alkenyl, C1-C6 alkynyl, 3-14-membered carbocycle or 3-14-membered heterocycle) derivatives.

[0597] (vi) Other Lipid Composition Components

[0598] The lipid composition of a pharmaceutical composition disclosed herein can include one or more components in addition to those described above. For example, the lipid composition can include one or more permeability enhancer molecules, carbohydrates, polymers, surface altering agents (e.g., surfactants), or other components. For example, a permeability enhancer molecule can be a molecule described by U.S. Patent Application Publication No. 2005/0222064. Carbohydrates can include simple sugars (e.g., glucose) and polysaccharides (e.g., glycogen and derivatives and analogs thereof).

[0599] A polymer can be included in and/or used to encapsulate or partially encapsulate a pharmaceutical composition disclosed herein (e.g., a pharmaceutical composition in lipid nanoparticle form). A polymer can be biodegradable and/or biocompatible. A polymer can be selected from, but is not limited to, polyamines, polyethers, polyamides, polyesters, polycarbamates, polyureas, polycarbonates, polystyrenes, polyimides, polysulfones, polyurethanes, polyacetylenes, polyethylenes, polyethyleneimines, polyisocyanates, polyacrylates, polymethacrylates, polyacrylonitriles, and polyarylates.

[0600] The ratio between the lipid composition and the polynucleotide range can be from about 10:1 to about 60:1 (wt/wt).

[0601] In some embodiments, the ratio between the lipid composition and the polynucleotide can be about 10:1, 11:1, 12:1, 13:1, 14:1, 15:1, 16:1, 17:1, 18:1, 19:1, 20:1, 21:1, 22:1, 23:1, 24:1, 25:1, 26:1, 27:1, 28:1, 29:1, 30:1, 31:1, 32:1, 33:1, 34:1, 35:1, 36:1, 37:1, 38:1, 39:1, 40:1, 41:1, 42:1, 43:1, 44:1, 45:1, 46:1, 47:1, 48:1, 49:1, 50:1, 51:1, 52:1, 53:1, 54:1, 55:1, 56:1, 57:1, 58:1, 59:1 or 60:1 (wt/wt). In some embodiments, the wt/wt ratio of the lipid composition to the polynucleotide encoding a therapeutic agent is about 20:1 or about 15:1.

[0602] In some embodiments, the pharmaceutical composition disclosed herein can contain more than one polypeptides. For example, a pharmaceutical composition disclosed herein can contain two or more polynucleotides (e.g., RNA, e.g., mRNA).

[0603] In one embodiment, the lipid nanoparticles described herein can comprise polynucleotides (e.g., mRNA) in a lipid:polynucleotide weight ratio of 5:1, 10:1, 15:1, 20:1, 25:1, 30:1, 35:1, 40:1, 45:1, 50:1, 55:1, 60:1 or 70:1, or a range or any of these ratios such as, but not limited to, 5:1 to about 10:1, from about 5:1 to about 15:1, from about 5:1 to about 20:1, from about 5:1 to about 25:1, from about 5:1 to about 30:1, from about 5:1 to about 35:1, from about 5:1 to about 40:1, from about 5:1 to about 45:1, from about 5:1 to about 50:1, from about 5:1 to about 55:1, from about 5:1 to about 60:1, from about 5:1 to about 70:1, from about 10:1 to about 15:1, from about 10:1 to about 20:1, from about 10:1 to about 25:1, from about 10:1 to about 30:1, from about 10:1 to about 35:1, from about 10:1 to about 40:1, from about 10:1 to about 45:1, from about 10:1 to about 50:1, from about 10:1 to about 55:1, from about 10:1 to about 60:1, from about 10:1 to about 70:1, from about 15:1 to about 20:1, from about 15:1 to about 25:1, from about 15:1 to about 30:1, from about 15:1 to about 35:1, from about 15:1 to about 40:1, from about 15:1 to about 45:1, from about 15:1 to about 50:1, from about 15:1 to about 55:1, from about 15:1 to about 60:1 or from about 15:1 to about 70:1.

[0604] In one embodiment, the lipid nanoparticles described herein can comprise the polynucleotide in a concentration from approximately 0.1 mg/ml to 2 mg/ml such as, but not limited to, 0.1 mg/ml, 0.2 mg/ml, 0.3 mg/ml, 0.4 mg/ml, 0.5 mg/ml, 0.6 mg/ml, 0.7 mg/ml, 0.8 mg/ml, 0.9 mg/ml, 1.0 mg/ml, 1.1 mg/ml, 1.2 mg/ml, 1.3 mg/ml, 1.4 mg/ml, 1.5 mg/ml, 1.6 mg/ml, 1.7 mg/ml, 1.8 mg/ml, 1.9 mg/ml, 2.0 mg/ml or greater than 2.0 mg/ml.

[0605] (vii) Nanoparticle Compositions

[0606] In some embodiments, the pharmaceutical compositions disclosed herein are formulated as lipid nanoparticles (LNP). Accordingly, the present disclosure also provides nanoparticle compositions comprising (i) a lipid composition comprising a delivery agent such as compound as described herein, and (ii) a polynucleotide encoding a wound healing polypeptide. In such nanoparticle composition, the lipid composition disclosed herein can encapsulate the polynucleotide encoding a wound healing polypeptide.

[0607] Nanoparticle compositions are typically sized on the order of micrometers or smaller and can include a lipid bilayer. Nanoparticle compositions encompass lipid nanoparticles (LNPs), liposomes (e.g., lipid vesicles), and lipoplexes. For example, a nanoparticle composition can be a liposome having a lipid bilayer with a diameter of 500 nm or less.

[0608] Nanoparticle compositions include, for example, lipid nanoparticles (LNPs), liposomes, and lipoplexes. In some embodiments, nanoparticle compositions are vesicles including one or more lipid bilayers. In certain embodiments, a nanoparticle composition includes two or more concentric bilayers separated by aqueous compartments. Lipid bilayers can be functionalized and/or crosslinked to one another. Lipid bilayers can include one or more ligands, proteins, or channels.

[0609] In one embodiment, a lipid nanoparticle comprises an ionizable lipid, a structural lipid, a phospholipid, and mRNA. In some embodiments, the LNP comprises an ionizable lipid, a PEG-modified lipid, a sterol and a structural lipid. In some embodiments, the LNP has a molar ratio of about 20-60% ionizable lipid:about 5-25% structural lipid:about 25-55% sterol; and about 0.5-15% PEG-modified lipid.

[0610] In some embodiments, the LNP has a polydispersity value of less than 0.4. In some embodiments, the LNP has a net neutral charge at a neutral pH. In some embodiments, the LNP has a mean diameter of 50-150 nm. In some embodiments, the LNP has a mean diameter of 80-100 nm.

[0611] As generally defined herein, the term “lipid” refers to a small molecule that has hydrophobic or amphiphilic properties. Lipids may be naturally occurring or synthetic. Examples of classes of lipids include, but are not limited to, fats, waxes, sterol-containing metabolites, vitamins, fatty acids, glycerolipids, glycerophospholipids, sphingolipids, saccharolipids, and polyketides, and prenol lipids. In some instances, the amphiphilic properties of some lipids leads them to form liposomes, vesicles, or membranes in aqueous media.

[0612] In some embodiments, a lipid nanoparticle (LNP) may comprise an ionizable lipid. As used herein, the term “ionizable lipid” has its ordinary meaning in the art and may refer to a lipid comprising one or more charged moieties. In some embodiments, an ionizable lipid may be positively charged or negatively charged. An ionizable lipid may be positively charged, in which case it can be referred to as “cationic lipid”. In certain embodiments, an ionizable lipid molecule may comprise an amine group, and can be referred to as an ionizable amino lipid. As used herein, a “charged moiety” is a chemical moiety that carries a formal electronic charge, e.g., monovalent (+1, or −1), divalent (+2, or −2), trivalent (+3, or −3), etc. The charged moiety may be anionic (i.e., negatively charged) or cationic (i.e., positively charged). Examples of positively-charged moieties include amine groups (e.g., primary, secondary, and/or tertiary amines), ammonium groups, pyridinium group, guanidine groups, and imidizolium groups. In a particular embodiment, the charged moieties comprise amine groups. Examples of negatively-charged groups or precursors thereof, include carboxylate groups, sulfonate groups, sulfate groups, phosphonate groups, phosphate groups, hydroxyl groups, and the like. The charge of the charged moiety may vary, in some cases, with the environmental conditions, for example, changes in pH may alter the charge of the moiety, and/or cause the moiety to become charged or uncharged. In general, the charge density of the molecule may be selected as desired.

[0613] It should be understood that the terms “charged” or “charged moiety” does not refer to a “partial negative charge” or “partial positive charge” on a molecule. The terms “partial negative charge” and “partial positive charge” are given its ordinary meaning in the art. A “partial negative charge” may result when a functional group comprises a bond that becomes polarized such that electron density is pulled toward one atom of the bond, creating a partial negative charge on the atom. Those of ordinary skill in the art will, in general, recognize bonds that can become polarized in this way.

[0614] In some embodiments, the ionizable lipid is an ionizable amino lipid, sometimes referred to in the art as an “ionizable cationic lipid”. In one embodiment, the ionizable amino lipid may have a positively charged hydrophilic head and a hydrophobic tail that are connected via a linker structure.

[0615] In addition to these, an ionizable lipid may also be a lipid including a cyclic amine group.

[0616] In one embodiment, the ionizable lipid may be selected from, but not limited to, an ionizable lipid described in International Publication Nos. WO2013086354 and WO2013116126; the contents of each of which are herein incorporated by reference in their entirety.

[0617] In yet another embodiment, the ionizable lipid may be selected from, but not limited to, formula CLI-CLXXXXII of U.S. Pat. No. 7,404,969; each of which is herein incorporated by reference in their entirety.

[0618] In one embodiment, the lipid may be a cleavable lipid such as those described in International Publication No. WO2012170889, herein incorporated by reference in its entirety. In one embodiment, the lipid may be synthesized by methods known in the art and/or as described in International Publication Nos. WO2013086354; the contents of each of which are herein incorporated by reference in their entirety.

[0619] Nanoparticle compositions can be characterized by a variety of methods. For example, microscopy (e.g., transmission electron microscopy or scanning electron microscopy) can be used to examine the morphology and size distribution of a nanoparticle composition. Dynamic light scattering or potentiometry (e.g., potentiometric titrations) can be used to measure zeta potentials. Dynamic light scattering can also be utilized to determine particle sizes. Instruments such as the Zetasizer Nano ZS (Malvern Instruments Ltd, Malvern, Worcestershire, UK) can also be used to measure multiple characteristics of a nanoparticle composition, such as particle size, polydispersity index, and zeta potential.

[0620] The size of the nanoparticles can help counter biological reactions such as, but not limited to, inflammation, or can increase the biological effect of the polynucleotide.

[0621] As used herein, “size” or “mean size” in the context of nanoparticle compositions refers to the mean diameter of a nanoparticle composition.

[0622] In one embodiment, the polynucleotide encoding a wound healing polypeptide are formulated in lipid nanoparticles having a diameter from about 10 to about 100 nm such as, but not limited to, about 10 to about 20 nm, about 10 to about 30 nm, about 10 to about 40 nm, about 10 to about 50 nm, about 10 to about 60 nm, about 10 to about 70 nm, about 10 to about 80 nm, about 10 to about 90 nm, about 20 to about 30 nm, about 20 to about 40 nm, about 20 to about 50 nm, about 20 to about 60 nm, about 20 to about 70 nm, about 20 to about 80 nm, about 20 to about 90 nm, about 20 to about 100 nm, about 30 to about 40 nm, about 30 to about 50 nm, about 30 to about 60 nm, about 30 to about 70 nm, about 30 to about 80 nm, about 30 to about 90 nm, about 30 to about 100 nm, about 40 to about 50 nm, about 40 to about 60 nm, about 40 to about 70 nm, about 40 to about 80 nm, about 40 to about 90 nm, about 40 to about 100 nm, about 50 to about 60 nm, about 50 to about 70 nm, about 50 to about 80 nm, about 50 to about 90 nm, about 50 to about 100 nm, about 60 to about 70 nm, about 60 to about 80 nm, about 60 to about 90 nm, about 60 to about 100 nm, about 70 to about 80 nm, about 70 to about 90 nm, about 70 to about 100 nm, about 80 to about 90 nm, about 80 to about 100 nm and/or about 90 to about 100 nm.

[0623] In one embodiment, the nanoparticles have a diameter from about 10 to 500 nm. In one embodiment, the nanoparticle has a diameter greater than 100 nm, greater than 150 nm, greater than 200 nm, greater than 250 nm, greater than 300 nm, greater than 350 nm, greater than 400 nm, greater than 450 nm, greater than 500 nm, greater than 550 nm, greater than 600 nm, greater than 650 nm, greater than 700 nm, greater than 750 nm, greater than 800 nm, greater than 850 nm, greater than 900 nm, greater than 950 nm or greater than 1000 nm.

[0624] In some embodiments, the largest dimension of a nanoparticle composition is 1 μm or shorter (e.g., 1 μm, 900 nm, 800 nm, 700 nm, 600 nm, 500 nm, 400 nm, 300 nm, 200 nm, 175 nm, 150 nm, 125 nm, 100 nm, 75 nm, 50 nm, or shorter).

[0625] A nanoparticle composition can be relatively homogenous. A polydispersity index can be used to indicate the homogeneity of a nanoparticle composition, e.g., the particle size distribution of the nanoparticle composition. A small (e.g., less than 0.3) polydispersity index generally indicates a narrow particle size distribution. A nanoparticle composition can have a polydispersity index from about 0 to about 0.25, such as 0.01, 0.02, 0.03, 0.04, 0.05, 0.06, 0.07, 0.08, 0.09, 0.10, 0.11, 0.12, 0.13, 0.14, 0.15, 0.16, 0.17, 0.18, 0.19, 0.20, 0.21, 0.22, 0.23, 0.24, or 0.25. In some embodiments, the polydispersity index of a nanoparticle composition disclosed herein can be from about 0.10 to about 0.20.

[0626] The zeta potential of a nanoparticle composition can be used to indicate the electrokinetic potential of the composition. For example, the zeta potential can describe the surface charge of a nanoparticle composition. Nanoparticle compositions with relatively low charges, positive or negative, are generally desirable, as more highly charged species can interact undesirably with cells, tissues, and other elements in the body. In some embodiments, the zeta potential of a nanoparticle composition disclosed herein can be from about −10 mV to about +20 mV, from about −10 mV to about +15 mV, from about 10 mV to about +10 mV, from about −10 mV to about +5 mV, from about −10 mV to about 0 mV, from about −10 mV to about −5 mV, from about −5 mV to about +20 mV, from about −5 mV to about +15 mV, from about −5 mV to about +10 mV, from about −5 mV to about +5 mV, from about −5 mV to about 0 mV, from about 0 mV to about +20 mV, from about 0 mV to about +15 mV, from about 0 mV to about +10 mV, from about 0 mV to about +5 mV, from about +5 mV to about +20 mV, from about +5 mV to about +15 mV, or from about +5 mV to about +10 mV.

[0627] In some embodiments, the zeta potential of the lipid nanoparticles can be from about 0 mV to about 100 mV, from about 0 mV to about 90 mV, from about 0 mV to about 80 mV, from about 0 mV to about 70 mV, from about 0 mV to about 60 mV, from about 0 mV to about 50 mV, from about 0 mV to about 40 mV, from about 0 mV to about 30 mV, from about 0 mV to about 20 mV, from about 0 mV to about 10 mV, from about 10 mV to about 100 mV, from about 10 mV to about 90 mV, from about 10 mV to about 80 mV, from about 10 mV to about 70 mV, from about 10 mV to about 60 mV, from about 10 mV to about 50 mV, from about 10 mV to about 40 mV, from about 10 mV to about 30 mV, from about 10 mV to about 20 mV, from about 20 mV to about 100 mV, from about 20 mV to about 90 mV, from about 20 mV to about 80 mV, from about 20 mV to about 70 mV, from about 20 mV to about 60 mV, from about 20 mV to about 50 mV, from about 20 mV to about 40 mV, from about 20 mV to about 30 mV, from about 30 mV to about 100 mV, from about 30 mV to about 90 mV, from about 30 mV to about 80 mV, from about 30 mV to about 70 mV, from about 30 mV to about 60 mV, from about 30 mV to about 50 mV, from about 30 mV to about 40 mV, from about 40 mV to about 100 mV, from about 40 mV to about 90 mV, from about 40 mV to about 80 mV, from about 40 mV to about 70 mV, from about 40 mV to about 60 mV, and from about 40 mV to about 50 mV. In some embodiments, the zeta potential of the lipid nanoparticles can be from about 10 mV to about 50 mV, from about 15 mV to about 45 mV, from about 20 mV to about 40 mV, and from about 25 mV to about 35 mV. In some embodiments, the zeta potential of the lipid nanoparticles can be about 10 mV, about 20 mV, about 30 mV, about 40 mV, about 50 mV, about 60 mV, about 70 mV, about 80 mV, about 90 mV, and about 100 mV.

[0628] The term “encapsulation efficiency” of a polynucleotide describes the amount of the polynucleotide that is encapsulated by or otherwise associated with a nanoparticle composition after preparation, relative to the initial amount provided. As used herein, “encapsulation” can refer to complete, substantial, or partial enclosure, confinement, surrounding, or encasement.

[0629] Encapsulation efficiency is desirably high (e.g., close to 100%). The encapsulation efficiency can be measured, for example, by comparing the amount of the polynucleotide in a solution containing the nanoparticle composition before and after breaking up the nanoparticle composition with one or more organic solvents or detergents.

[0630] Fluorescence can be used to measure the amount of free polynucleotide in a solution. For the nanoparticle compositions described herein, the encapsulation efficiency of a polynucleotide can be at least 50%, for example 50%, 55%, 60%, 65%, 70%, 75%, 80%, 85%, 90%, 91%, 92%, 93%, 94%, 95%, 96%, 97%, 98%, 99%, or 100%. In some embodiments, the encapsulation efficiency can be at least 80%. In certain embodiments, the encapsulation efficiency can be at least 90%.

[0631] The amount of a polynucleotide present in a pharmaceutical composition disclosed herein can depend on multiple factors such as the size of the polynucleotide, desired target and/or application, or other properties of the nanoparticle composition as well as on the properties of the polynucleotide.

[0632] For example, the amount of an mRNA useful in a nanoparticle composition can depend on the size (expressed as length, or molecular mass), sequence, and other characteristics of the mRNA. The relative amounts of a polynucleotide in a nanoparticle composition can also vary.

[0633] The relative amounts of the lipid composition and the polynucleotide present in a lipid nanoparticle composition of the present disclosure can be optimized according to considerations of efficacy and tolerability. For compositions including an mRNA as a polynucleotide, the N:P ratio can serve as a useful metric.

[0634] As the N:P ratio of a nanoparticle composition controls both expression and tolerability, nanoparticle compositions with low N:P ratios and strong expression are desirable. N:P ratios vary according to the ratio of lipids to RNA in a nanoparticle composition.

[0635] In general, a lower N:P ratio is preferred. The one or more RNA, lipids, and amounts thereof can be selected to provide an N:P ratio from about 2:1 to about 30:1, such as 2:1, 3:1, 4:1, 5:1, 6:1, 7:1, 8:1, 9:1, 10:1, 12:1, 14:1, 16:1, 18:1, 20:1, 22:1, 24:1, 26:1, 28:1, or 30:1. In certain embodiments, the N:P ratio can be from about 2:1 to about 8:1. In other embodiments, the N:P ratio is from about 5:1 to about 8:1. In certain embodiments, the N:P ratio is between 5:1 and 6:1. In one specific aspect, the N:P ratio is about is about 5.67:1.

[0636] In addition to providing nanoparticle compositions, the present disclosure also provides methods of producing lipid nanoparticles comprising encapsulating a polynucleotide. Such method comprises using any of the pharmaceutical compositions disclosed herein and producing lipid nanoparticles in accordance with methods of production of lipid nanoparticles known in the art. See, e.g., Wang et al. (2015) “Delivery of oligonucleotides with lipid nanoparticles” Adv. Drug Deliv. Rev. 87:68-80; Silva et al. (2015) “Delivery Systems for Biopharmaceuticals. Part I: Nanoparticles and Microparticles” Curr. Pharm. Technol. 16: 940-954; Naseri et al. (2015) “Solid Lipid Nanoparticles and Nanostructured Lipid Carriers: Structure, Preparation and Application” Adv. Pharm. Bull. 5:305-13; Silva et al. (2015) “Lipid nanoparticles for the delivery of biopharmaceuticals” Curr. Pharm. Biotechnol. 16:291-302, and references cited therein.

### 21. OTHER DELIVERY AGENTS

[0637] a. Liposomes, Lipoplexes, and Lipid Nanoparticles

[0638] In some embodiments, the compositions or formulations of the present disclosure comprise a delivery agent, e.g., a liposome, a lioplexes, a lipid nanoparticle, or any combination thereof. The polynucleotides described herein (e.g., a polynucleotide comprising a nucleotide sequence encoding a wound healing polypeptide) can be formulated using one or more liposomes, lipoplexes, or lipid nanoparticles. Liposomes, lipoplexes, or lipid nanoparticles can be used to improve the efficacy of the polynucleotides directed protein production as these formulations can increase cell transfection by the polynucleotide; and/or increase the translation of encoded protein. The liposomes, lipoplexes, or lipid nanoparticles can also be used to increase the stability of the polynucleotides.

[0639] Liposomes are artificially-prepared vesicles that can primarily be composed of a lipid bilayer and can be used as a delivery vehicle for the intradermal (e.g., using microneedles) or topical administration of pharmaceutical formulations. Liposomes can be of different sizes. A multilamellar vesicle (MLV) can be hundreds of nanometers in diameter, and can contain a series of concentric bilayers separated by narrow aqueous compartments. A small unicellular vesicle (SUV) can be smaller than 50 nm in diameter, and a large unilamellar vesicle (LUV) can be between 50 and 500 nm in diameter. Liposome design can include, but is not limited to, opsonins or ligands to improve the attachment of liposomes to unhealthy tissue or to activate events such as, but not limited to, endocytosis. Liposomes can contain a low or a high pH value in order to improve the delivery of the pharmaceutical formulations.

[0640] The formation of liposomes can depend on the pharmaceutical formulation entrapped and the liposomal ingredients, the nature of the medium in which the lipid vesicles are dispersed, the effective concentration of the entrapped substance and its potential toxicity, any additional processes involved during the application and/or delivery of the vesicles, the optimal size, polydispersity and the shelf-life of the vesicles for the intended application, and the batch-to-batch reproducibility and scale up production of safe and efficient liposomal products, etc.

[0641] As a non-limiting example, liposomes such as synthetic membrane vesicles can be prepared by the methods, apparatus and devices described in U.S. Pub. Nos. US20130177638, US20130177637, US20130177636, US20130177635, US20130177634, US20130177633, US20130183375, US20130183373, and US20130183372. In some embodiments, the polynucleotides described herein can be encapsulated by the liposome and/or it can be contained in an aqueous core that can then be encapsulated by the liposome as described in, e.g., Intl. Pub. Nos. WO2012031046, WO2012031043, WO2012030901, WO2012006378, and WO2013086526; and U.S. Pub. Nos. US20130189351, US20130195969 and US20130202684. Each of the references in herein incorporated by reference in its entirety.

[0642] In some embodiments, the polynucleotides described herein can be formulated in a cationic oil-in-water emulsion where the emulsion particle comprises an oil core and a cationic lipid that can interact with the polynucleotide anchoring the molecule to the emulsion particle. In some embodiments, the polynucleotides described herein can be formulated in a water-in-oil emulsion comprising a continuous hydrophobic phase in which the hydrophilic phase is dispersed. Exemplary emulsions can be made by the methods described in Intl. Pub. Nos. WO2012006380 and WO201087791, each of which is herein incorporated by reference in its entirety.

[0643] In some embodiments, the polynucleotides described herein can be formulated in a lipid-polycation complex. The formation of the lipid-polycation complex can be accomplished by methods as described in, e.g., U.S. Pub. No. US20120178702. As a non-limiting example, the polycation can include a cationic peptide or a polypeptide such as, but not limited to, polylysine, polyornithine and/or polyarginine and the cationic peptides described in Intl. Pub. No. WO2012013326 or U.S. Pub. No. US20130142818. Each of the references is herein incorporated by reference in its entirety.

[0644] In some embodiments, the polynucleotides described herein can be formulated in a lipid nanoparticle (LNP) such as those described in Intl. Pub. Nos. WO2013123523, WO2012170930, WO2011127255 and WO2008103276; and U.S. Pub. No. US20130171646, each of which is herein incorporated by reference in its entirety.

[0645] Lipid nanoparticle formulations typically comprise one or more lipids. In some embodiments, the lipid is an ionizable lipid (e.g., an ionizable amino lipid), sometimes referred to in the art as an “ionizable cationic lipid”. In some embodiments, lipid nanoparticle formulations further comprise other components, including a phospholipid, a structural lipid, and a molecule capable of reducing particle aggregation, for example a PEG or PEG-modified lipid.

[0646] Exemplary ionizable lipids include, but not limited to, any one of Compounds 1-342 disclosed herein, DLin-MC3-DMA (MC3), DLin-DMA, DLenDMA, DLin-D-DMA, DLin-K-DMA, DLin-M-C₂-DMA, DLin-K-DMA, DLin-KC2-DMA, DLin-KC3-DMA, DLin-KC4-DMA, DLin-C2K-DMA, DLin-MP-DMA, DODMA, 98N12-5, C12-200, DLin-C-DAP, DLin-DAC, DLinDAP, DLinAP, DLin-EG-DMA, DLin-2-DMAP, KL10, KL22, KL25, Octyl-CLinDMA, Octyl-CLinDMA (2R), Octyl-CLinDMA (2S), and any combination thereof. Other exemplary ionizable lipids include, (13Z,16Z)—N,N-dimethyl-3-nonyldocosa-13,16-dien-1-amine (L608), (20Z,23Z)—N,N-dimethylnonacosa-20,23-dien-10-amine, (17Z,20Z)—N,N-dimemylhexacosa-17,20-dien-9-amine, (16Z,19Z)—N5N-dimethylpentacosa-16,19-dien-8-amine, (13Z,16Z)—N,N-dimethyldocosa-13,16-dien-5-amine, (12Z,15Z)—N,N-dimethylhenicosa-12,15-dien-4-amine, (14Z,17Z)—N,N-dimethyltricosa-14,17-dien-6-amine, (15Z,18Z)—N,N-dimethyltetracosa-15,18-dien-7-amine, (18Z,21Z)—N,N-dimethylheptacosa-18,21-dien-10-amine, (15Z,18Z)—N,N-dimethyltetracosa-15,18-dien-5-amine, (14Z,17Z)—N,N-dimethyltricosa-14,17-dien-4-amine, (19Z,22Z)—N,N-dimeihyloctacosa-19,22-dien-9-amine, (18Z,21Z)—N,N-dimethylheptacosa-18,21-dien-8-amine, (17Z,20Z)—N,N-dimethylhexacosa-17,20-dien-7-amine, (16Z,19Z)—N,N-dimethylpentacosa-16,19-dien-6-amine, (22Z,25Z)—N,N-dimethylhentriaconta-22,25-dien-10-amine, (21Z,24Z)—N,N-dimethyltriaconta-21,24-dien-9-amine, (18Z)—N,N-dimetylheptacos-18-en-10-amine, (17Z)—N,N-dimethylhexacos-17-en-9-amine, (19Z,22Z)—N,N-dimethyloctacosa-19,22-dien-7-amine, N,N-dimethylheptacosan-10-amine, (20Z,23Z)—N-ethyl-N-methylnonacosa-20,23-dien-10-amine, 1-[(11Z,14Z)-1-nonylicosa-11,14-dien-1-yl]pyrrolidine, (20Z)—N,N-dimethylheptacos-20-en-10-amine, (15Z)—N,N-dimethyl eptacos-15-en-10-amine, (14Z)—N,N-dimethylnonacos-14-en-10-amine, (17Z)—N,N-dimethylnonacos-17-en-10-amine, (24Z)—N,N-dimethyltritriacont-24-en-10-amine, (20Z)—N,N-dimethylnonacos-20-en-10-amine, (22Z)—N,N-dimethylhentriacont-22-en-10-amine, (16Z)—N,N-dimethylpentacos-16-en-8-amine, (12Z,15Z)—N,N-dimethyl-2-nonylhenicosa-12,15-dien-1-amine, N,N-dimethyl-1-[(1S,2R)-2-octylcyclopropyl] eptadecan-8-amine, 1-[(1S,2R)-2-hexylcyclopropyl]-N,N-dimethylnonadecan-10-amine, N,N-dimethyl-1-[(1S,2R)-2-octylcyclopropyl]nonadecan-10-amine, N,N-dimethyl-21-[(1S,2R)-2-octylcyclopropyl]henicosan-10-amine, N,N-dimethyl-1-[(1S,2S)-2-{[(1R,2R)-2-pentylcycIopropyl]methyl}cyclopropyl]nonadecan-10-amine, N,N-dimethyl-1-[(1S,2R)-2-octylcyclopropyl]hexadecan-8-amine, N,N-dimethyl-[(1R,2S)-2-undecyIcyclopropyl]tetradecan-5-amine, N,N-dimethyl-3-{7-[(1S,2R)-2-octylcyclopropyl]heptyl}dodecan-1-amine, 1-[(1R,2S)-2-heptylcyclopropyl]-N,N-dimethyloctadecan-9-amine, 1-[(1S,2R)-2-decylcyclopropyl]-N,N-dimethylpentadecan-6-amine, N,N-dimethyl-1-[(1S,2R)-2-octylcyclopropyl]pentadecan-8-amine, R—N,N-dimethyl-1-[(9Z,12Z)-octadeca-9,12-dien-1-yloxy]-3-(octyloxy)propan-2-amine, S—N,N-dimethyl-1-[(9Z,12Z)-octadeca-9,12-dien-1-yloxy]-3-(octyloxy)propan-2-amine, 1-1-{2-[(9Z,12Z)-octadeca-9,12-dien-1-yloxy]-1-[(octyloxy)methyl]ethyl}pyrrolidine, (2S)—N,N-dimethyl-1-[(9Z,12Z)-octadeca-9,12-dien-1-yloxy]-3-[(5Z)-oct-5-en-1-yloxy]propan-2-amine, 1-{2-[(9Z,12Z)-octadeca-9,12-dien-1-yloxy]-1-[(octyloxy)methyl]ethyl}azetidine, (2S)-1-(hexyloxy)-N,N-dimethyl-3-[(9Z,12Z)-octadeca-9,12-dien-1-yloxy]propan-2-amine, (2S)-1-(heptyloxy)-N,N-dimethyl-3-[(9Z,12Z)-octadeca-9,12-dien-1-yloxy]propan-2-amine, N,N-dimethyl-1-(nonyloxy)-3-[(9Z,12Z)-octadeca-9,12-dien-1-yloxy]propan-2-amine, N,N-dimethyl-1-[(9Z)-octadec-9-en-1-yloxy]-3-(octyloxy)propan-2-amine; (2S)—N,N-dimethyl-1-[(6Z,9Z,12Z)-octadeca-6,9,12-tri en-1-yloxy]-3-(octyloxy)propan-2-amine, (2S)-1-[(11Z,14Z)-icosa-11,14-dien-1-yloxy]-N,N-dimethyl-3-(pentyloxy)propan-2-amine, (2S)-1-(hexyloxy)-3-[(11Z,14Z)-icosa-11,14-dien-1-yloxy]-N,N-dimethylpropan-2-amine, 1-[(11Z,14Z)-icosa-11,14-dien-1-yloxy]-N,N-dimethyl-3-(octyloxy)propan-2-amine, 1-[(13Z,16Z)-docosa-13,16-dien-1-yloxy]-N,N-dimethyl-3-(octyloxy)propan-2-amine, (2S)-1-[(13Z, 16Z)-docosa-13,16-dien-1-yloxy]-3-(hexyloxy)-N,N-dimethylpropan-2-amine, (2S)-1-[(13Z)-docos-13-en-1-yloxy]-3-(hexyloxy)-N,N-dimethylpropan-2-amine, 1-[(13Z)-docos-13-en-1-yloxy]-N,N-dimethyl-3-(octyloxy)propan-2-amine, 1-[(9Z)-hexadec-9-en-1-yloxy]-N,N-dimethyl-3-(octyloxy)propan-2-amine, (2R)—N,N-dimethyl-H(1-metoyloctyl)oxy]-3-[(9Z,12Z)-octadeca-9,12-dien-1-yloxy]propan-2-amine, (2R)-1-[(3,7-dimethyloctyl)oxy]-N,N-dimethyl-3-[(9Z,12Z)-octadeca-9,12-dien-1-yloxy]propan-2-amine, N,N-dimethyl-1-(octyloxy)-3-({8-[(1S,2S)-2-{[(1R,2R)-2-pentylcyclopropyl]methyl}cyclopropyl]octyl}oxy)propan-2-amine, N,N-dimethyl-1-{[8-(2-oclylcyclopropyl)octyl]oxy}-3-(octyloxy)propan-2-amine, and (11E,20Z,23Z)—N,N-dimethylnonacosa-11,20,2-trien-10-amine, and any combination thereof.

[0647] Phospholipids include, but are not limited to, glycerophospholipids such as phosphatidylcholines, phosphatidylethanolamines, phosphatidylserines, phosphatidylinositols, phosphatidyl glycerols, and phosphatidic acids. Phospholipids also include phosphosphingolipid, such as sphingomyelin. In some embodiments, the phospholipids are DLPC, DMPC, DOPC, DPPC, DSPC, DUPC, 18:0 Diether PC, DLnPC, DAPC, DHAPC, DOPE, 4ME 16:0 PE, DSPE, DLPE, DLnPE, DAPE, DHAPE, DOPG, and any combination thereof. In some embodiments, the phospholipids are MPPC, MSPC, PMPC, PSPC, SMPC, SPPC, DHAPE, DOPG, and any combination thereof. In some embodiments, the amount of phospholipids (e.g., DSPC) in the lipid composition ranges from about 1 mol % to about 20 mol %.

[0648] The structural lipids include sterols and lipids containing sterol moieties. In some embodiments, the structural lipids include cholesterol, fecosterol, sitosterol, ergosterol, campesterol, stigmasterol, brassicasterol, tomatidine, tomatine, ursolic acid, alpha-tocopherol, and mixtures thereof. In some embodiments, the structural lipid is cholesterol. In some embodiments, the amount of the structural lipids (e.g., cholesterol) in the lipid composition ranges from about 20 mol % to about 60 mol %.

[0649] The PEG-modified lipids include PEG-modified phosphatidylethanolamine and phosphatidic acid, PEG-ceramide conjugates (e.g., PEG-CerC14 or PEG-CerC20), PEG-modified dialkylamines and PEG-modified 1,2-diacyloxypropan-3-amines. Such lipids are also referred to as PEGylated lipids. For example, a PEG lipid can be PEG-c-DOMG, PEG-DMG, PEG-DLPE, PEG DMPE, PEG-DPPC, or a PEG-DSPE lipid. In some embodiments, the PEG-lipid are 1,2-dimyristoyl-sn-glycerol methoxypolyethylene glycol (PEG-DMG), 1,2-distearoyl-sn-glycero-3-phosphoethanolamine-N-[amino(polyethylene glycol)] (PEG-DSPE), PEG-disteryl glycerol (PEG-DSG), PEG-dipalmetoleyl, PEG-dioleyl, PEG-distearyl, PEG-diacylglycamide (PEG-DAG), PEG-dipalmitoyl phosphatidylethanolamine (PEG-DPPE), or PEG-1,2-dimyristyloxlpropyl-3-amine (PEG-c-DMA). In some embodiments, the PEG moiety has a size of about 1000, 2000, 5000, 10,000, 15,000 or 20,000 daltons. In some embodiments, the amount of PEG-lipid in the lipid composition ranges from about 0 mol % to about 5 mol %.

[0650] In some embodiments, the LNP formulations described herein can additionally comprise a permeability enhancer molecule. Non-limiting permeability enhancer molecules are described in U.S. Pub. No. US20050222064, herein incorporated by reference in its entirety.

[0651] The LNP formulations can further contain a phosphate conjugate. The phosphate conjugate can increase in vivo circulation times and/or increase the targeted delivery of the nanoparticle. Phosphate conjugates can be made by the methods described in, e.g., Intl. Pub. No. WO2013033438 or U.S. Pub. No. US20130196948. The LNP formulation can also contain a polymer conjugate (e.g., a water soluble conjugate) as described in, e.g., U.S. Pub. Nos. US20130059360, US20130196948, and US20130072709. Each of the references is herein incorporated by reference in its entirety.

[0652] The LNP formulations can comprise a conjugate to enhance the delivery of nanoparticles of the present invention in a subject. Further, the conjugate can inhibit phagocytic clearance of the nanoparticles in a subject. In some embodiments, the conjugate can be a “self” peptide designed from the human membrane protein CD47 (e.g., the “self” particles described by Rodriguez et al, Science 2013 339, 971-975, herein incorporated by reference in its entirety). As shown by Rodriguez et al. the self peptides delayed macrophage-mediated clearance of nanoparticles which enhanced delivery of the nanoparticles.

[0653] The LNP formulations can comprise a carbohydrate carrier. As a non-limiting example, the carbohydrate carrier can include, but is not limited to, an anhydride-modified phytoglycogen or glycogen-type material, phytoglycogen octenyl succinate, phytoglycogen beta-dextrin, anhydride-modified phytoglycogen beta-dextrin (e.g., Intl. Pub. No. WO2012109121, herein incorporated by reference in its entirety).

[0654] The LNP formulations can be coated with a surfactant or polymer to improve the delivery of the particle. In some embodiments, the LNP can be coated with a hydrophilic coating such as, but not limited to, PEG coatings and/or coatings that have a neutral surface charge as described in U.S. Pub. No. US20130183244, herein incorporated by reference in its entirety.

[0655] The LNP formulations can be engineered to alter the surface properties of particles so that the lipid nanoparticles can penetrate the mucosal barrier as described in U.S. Pat. No. 8,241,670 or Intl. Pub. No. WO2013110028, each of which is herein incorporated by reference in its entirety.

[0656] The LNP engineered to penetrate mucus can comprise a polymeric material (i.e., a polymeric core) and/or a polymer-vitamin conjugate and/or a tri-block copolymer. The polymeric material can include, but is not limited to, polyamines, polyethers, polyamides, polyesters, polycarbamates, polyureas, polycarbonates, poly(styrenes), polyimides, polysulfones, polyurethanes, polyacetylenes, polyethylenes, polyethyeneimines, polyisocyanates, polyacrylates, polymethacrylates, polyacrylonitriles, and polyarylates.

[0657] LNP engineered to penetrate mucus can also include surface altering agents such as, but not limited to, polynucleotides, anionic proteins (e.g., bovine serum albumin), surfactants (e.g., cationic surfactants such as for example dimethyldioctadecyl-ammonium bromide), sugars or sugar derivatives (e.g., cyclodextrin), nucleic acids, polymers (e.g., heparin, polyethylene glycol and poloxamer), mucolytic agents (e.g., N-acetylcysteine, mugwort, bromelain, papain, clerodendrum, acetylcysteine, bromhexine, carbocisteine, eprazinone, mesna, ambroxol, sobrerol, domiodol, letosteine, stepronin, tiopronin, gelsolin, thymosin (34 dornase alfa, neltenexine, erdosteine) and various DNases including rhDNase.

[0658] In some embodiments, the mucus penetrating LNP can be a hypotonic formulation comprising a mucosal penetration enhancing coating. The formulation can be hypotonic for the epithelium to which it is being delivered. Non-limiting examples of hypotonic formulations can be found in, e.g., Intl. Pub. No. WO2013110028, herein incorporated by reference in its entirety.

[0659] In some embodiments, the polynucleotide described herein is formulated as a lipoplex, such as, without limitation, the ATUPLEX™ system, the DACC system, the DBTC system and other siRNA-lipoplex technology from Silence Therapeutics (London, United Kingdom), STEMFECT™ from STEMGENT® (Cambridge, Mass.), and polyethylenimine (PEI) or protamine-based targeted and non-targeted delivery of nucleic acids (Aleku et al. Cancer Res. 2008 68:9788-9798; Strumberg et al. Int J Clin Pharmacol Ther 2012 50:76-78; Santel et al., Gene Ther 2006 13:1222-1234; Santel et al., Gene Ther 2006 13:1360-1370; Gutbier et al., Pulm Pharmacol. Ther. 2010 23:334-344; Kaufmann et al. Microvasc Res 2010 80:286-293 Weide et al. J Immunother. 2009 32:498-507; Weide et al. J Immunother. 2008 31:180-188; Pascolo Expert Opin. Biol. Ther. 4:1285-1294; Fotin-Mleczek et al., 2011 J. Immunother. 34:1-15; Song et al., Nature Biotechnol. 2005, 23:709-717; Peer et al., Proc Natl Acad Sci USA. 2007 6; 104:4095-4100; deFougerolles Hum Gene Ther. 2008 19:125-132; all of which are incorporated herein by reference in its entirety).

[0660] In some embodiments, the polynucleotides described herein are formulated as a solid lipid nanoparticle (SLN), which can be spherical with an average diameter between 10 to 1000 nm. SLN possess a solid lipid core matrix that can solubilize lipophilic molecules and can be stabilized with surfactants and/or emulsifiers. Exemplary SLN can be those as described in Intl. Pub. No. WO2013105101, herein incorporated by reference in its entirety.

[0661] In some embodiments, the polynucleotides described herein can be formulated for controlled release and/or targeted delivery. As used herein, “controlled release” refers to a pharmaceutical composition or compound release profile that conforms to a particular pattern of release to effect a therapeutic outcome. In one embodiment, the polynucleotides can be encapsulated into a delivery agent described herein and/or known in the art for controlled release and/or targeted delivery. As used herein, the term “encapsulate” means to enclose, surround or encase. As it relates to the formulation of the compounds of the invention, encapsulation can be substantial, complete or partial. The term “substantially encapsulated” means that at least greater than 50, 60, 70, 80, 85, 90, 95, 96, 97, 98, 99, or greater than 99% of the pharmaceutical composition or compound of the invention can be enclosed, surrounded or encased within the delivery agent. “Partially encapsulation” means that less than 10, 10, 20, 30, 40 50 or less of the pharmaceutical composition or compound of the invention can be enclosed, surrounded or encased within the delivery agent.

[0662] Advantageously, encapsulation can be determined by measuring the escape or the activity of the pharmaceutical composition or compound of the invention using fluorescence and/or electron micrograph. For example, at least 1, 5, 10, 20, 30, 40, 50, 60, 70, 80, 85, 90, 95, 96, 97, 98, 99, 99.9, or greater than 99% of the pharmaceutical composition or compound of the invention are encapsulated in the delivery agent.

[0663] In some embodiments, the polynucleotides described herein can be encapsulated in a therapeutic nanoparticle, referred to herein as “therapeutic nanoparticle polynucleotides.” Therapeutic nanoparticles can be formulated by methods described in, e.g., Intl. Pub. Nos. WO2010005740, WO2010030763, WO2010005721, WO2010005723, and WO2012054923; and U.S. Pub. Nos. US20110262491, US20100104645, US20100087337, US20100068285, US20110274759, US20100068286, US20120288541, US20120140790, US20130123351 and US20130230567; and U.S. Pat. Nos. 8,206,747, 8,293,276, 8,318,208 and 8,318,211, each of which is herein incorporated by reference in its entirety.

[0664] In some embodiments, the therapeutic nanoparticle polynucleotide can be formulated for sustained release. As used herein, “sustained release” refers to a pharmaceutical composition or compound that conforms to a release rate over a specific period of time. The period of time can include, but is not limited to, hours, days, weeks, months and years. As a non-limiting example, the sustained release nanoparticle of the polynucleotides described herein can be formulated as disclosed in Intl. Pub. No. WO2010075072 and U.S. Pub. Nos. US20100216804, US20110217377, US20120201859 and US20130150295, each of which is herein incorporated by reference in their entirety.

[0665] In some embodiments, the therapeutic nanoparticle polynucleotide can be formulated to be target specific, such as those described in Intl. Pub. Nos. WO2008121949, WO2010005726, WO2010005725, WO2011084521 and WO2011084518; and U.S. Pub. Nos. US20100069426, US20120004293 and US20100104655, each of which is herein incorporated by reference in its entirety.

[0666] The LNPs can be prepared using microfluidic mixers or micromixers. Exemplary microfluidic mixers can include, but are not limited to, a slit interdigital micromixer including, but not limited to those manufactured by Microinnova (Allerheiligen bei Wildon, Austria) and/or a staggered herringbone micromixer (SHM) (see Zhigaltsev et al., “Bottom-up design and synthesis of limit size lipid nanoparticle systems with aqueous and triglyceride cores using millisecond microfluidic mixing,” Langmuir 28:3633-40 (2012); Belliveau et al., “Microfluidic synthesis of highly potent limit-size lipid nanoparticles for in vivo delivery of siRNA,” Molecular Therapy-Nucleic Acids. 1:e37 (2012); Chen et al., “Rapid discovery of potent siRNA-containing lipid nanoparticles enabled by controlled microfluidic formulation,” J. Am. Chem. Soc. 134(16):6948-51 (2012); each of which is herein incorporated by reference in its entirety). Exemplary micromixers include Slit Interdigital Microstructured Mixer (SIMM-V2) or a Standard Slit Interdigital Micro Mixer (SSIMM) or Caterpillar (CPMM) or Impinging-jet (IJMM) from the Institut für Mikrotechnik Mainz GmbH, Mainz Germany. In some embodiments, methods of making LNP using SHM further comprise mixing at least two input streams wherein mixing occurs by microstructure-induced chaotic advection (MICA). According to this method, fluid streams flow through channels present in a herringbone pattern causing rotational flow and folding the fluids around each other. This method can also comprise a surface for fluid mixing wherein the surface changes orientations during fluid cycling. Methods of generating LNPs using SHM include those disclosed in U.S. Pub. Nos. US20040262223 and US20120276209, each of which is incorporated herein by reference in their entirety.

[0667] In some embodiments, the polynucleotides described herein can be formulated in lipid nanoparticles using microfluidic technology (see Whitesides, George M., “The Origins and the Future of Microfluidics,” Nature 442: 368-373 (2006); and Abraham et al., “Chaotic Mixer for Microchannels,” Science 295: 647-651 (2002); each of which is herein incorporated by reference in its entirety). In some embodiments, the polynucleotides can be formulated in lipid nanoparticles using a micromixer chip such as, but not limited to, those from Harvard Apparatus (Holliston, Mass.) or Dolomite Microfluidics (Royston, UK). A micromixer chip can be used for rapid mixing of two or more fluid streams with a split and recombine mechanism.

[0668] In some embodiments, the polynucleotides described herein can be formulated in lipid nanoparticles having a diameter from about 1 nm to about 100 nm such as, but not limited to, about 1 nm to about 20 nm, from about 1 nm to about 30 nm, from about 1 nm to about 40 nm, from about 1 nm to about 50 nm, from about 1 nm to about 60 nm, from about 1 nm to about 70 nm, from about 1 nm to about 80 nm, from about 1 nm to about 90 nm, from about 5 nm to about from 100 nm, from about 5 nm to about 10 nm, about 5 nm to about 20 nm, from about 5 nm to about 30 nm, from about 5 nm to about 40 nm, from about 5 nm to about 50 nm, from about 5 nm to about 60 nm, from about 5 nm to about 70 nm, from about 5 nm to about 80 nm, from about 5 nm to about 90 nm, about 10 to about 20 nm, about 10 to about 30 nm, about 10 to about 40 nm, about 10 to about 50 nm, about 10 to about 60 nm, about 10 to about 70 nm, about 10 to about 80 nm, about 10 to about 90 nm, about 20 to about 30 nm, about 20 to about 40 nm, about 20 to about 50 nm, about 20 to about 60 nm, about 20 to about 70 nm, about 20 to about 80 nm, about 20 to about 90 nm, about 20 to about 100 nm, about 30 to about 40 nm, about 30 to about 50 nm, about 30 to about 60 nm, about 30 to about 70 nm, about 30 to about 80 nm, about 30 to about 90 nm, about 30 to about 100 nm, about 40 to about 50 nm, about 40 to about 60 nm, about 40 to about 70 nm, about 40 to about 80 nm, about 40 to about 90 nm, about 40 to about 100 nm, about 50 to about 60 nm, about 50 to about 70 nm about 50 to about 80 nm, about 50 to about 90 nm, about 50 to about 100 nm, about 60 to about 70 nm, about 60 to about 80 nm, about 60 to about 90 nm, about 60 to about 100 nm, about 70 to about 80 nm, about 70 to about 90 nm, about 70 to about 100 nm, about 80 to about 90 nm, about 80 to about 100 nm and/or about 90 to about 100 nm.

[0669] In some embodiments, the lipid nanoparticles can have a diameter from about 10 to 500 nm. In one embodiment, the lipid nanoparticle can have a diameter greater than 100 nm, greater than 150 nm, greater than 200 nm, greater than 250 nm, greater than 300 nm, greater than 350 nm, greater than 400 nm, greater than 450 nm, greater than 500 nm, greater than 550 nm, greater than 600 nm, greater than 650 nm, greater than 700 nm, greater than 750 nm, greater than 800 nm, greater than 850 nm, greater than 900 nm, greater than 950 nm or greater than 1000 nm.

[0670] In some embodiments, the polynucleotides can be delivered using smaller

[0671] LNPs. Such particles can comprise a diameter from below 0.1 μm up to 100 nm such as, but not limited to, less than 0.1 μm, less than 1.0 μm, less than 5 μm, less than 10 μm, less than 15 um, less than 20 um, less than 25 um, less than 30 um, less than 35 um, less than 40 um, less than 50 um, less than 55 um, less than 60 um, less than 65 um, less than 70 um, less than 75 um, less than 80 um, less than 85 um, less than 90 um, less than 95 um, less than 100 um, less than 125 um, less than 150 um, less than 175 um, less than 200 um, less than 225 um, less than 250 um, less than 275 um, less than 300 um, less than 325 um, less than 350 um, less than 375 um, less than 400 um, less than 425 um, less than 450 um, less than 475 um, less than 500 um, less than 525 um, less than 550 um, less than 575 um, less than 600 um, less than 625 um, less than 650 um, less than 675 um, less than 700 um, less than 725 um, less than 750 um, less than 775 um, less than 800 um, less than 825 um, less than 850 um, less than 875 um, less than 900 um, less than 925 um, less than 950 um, or less than 975 um.

[0672] The nanoparticles and microparticles described herein can be geometrically engineered to modulate macrophage and/or the immune response. The geometrically engineered particles can have varied shapes, sizes and/or surface charges to incorporate the polynucleotides described herein for targeted delivery such as, but not limited to, pulmonary delivery (see, e.g., Intl. Pub. No. WO2013082111, herein incorporated by reference in its entirety). Other physical features the geometrically engineering particles can include, but are not limited to, fenestrations, angled arms, asymmetry and surface roughness, charge that can alter the interactions with cells and tissues.

[0673] In some embodiment, the nanoparticles described herein are stealth nanoparticles or target-specific stealth nanoparticles such as, but not limited to, those described in U.S. Pub. No. US20130172406, herein incorporated by reference in its entirety. The stealth or target-specific stealth nanoparticles can comprise a polymeric matrix, which can comprise two or more polymers such as, but not limited to, polyethylenes, polycarbonates, polyanhydrides, polyhydroxyacids, polypropylfumerates, polycaprolactones, polyamides, polyacetals, polyethers, polyesters, poly(orthoesters), polycyanoacrylates, polyvinyl alcohols, polyurethanes, polyphosphazenes, polyacrylates, polymethacrylates, polycyanoacrylates, polyureas, polystyrenes, polyamines, polyesters, polyanhydrides, polyethers, polyurethanes, polymethacrylates, polyacrylates, polycyanoacrylates, or combinations thereof.

[0674] b. Lipidoids

[0675] In some embodiments, the compositions or formulations of the present disclosure comprise a delivery agent, e.g., a lipidoid. The polynucleotides described herein (e.g., a polynucleotide comprising a nucleotide sequence encoding a wound healing polypeptide) can be formulated with lipidoids. Complexes, micelles, liposomes or particles can be prepared containing these lipidoids and therefore to achieve an effective delivery of the polynucleotide, as judged by the production of an encoded protein, following the injection of a lipidoid formulation via localized (e.g., intradermal (e.g., using microneedles) or topical) and/or systemic routes of administration. Lipidoid complexes of polynucleotides can be administered by various means including, but not limited to, intradermal (e.g., using microneedles), topical, intravenous, intramuscular, or subcutaneous routes.

[0676] The synthesis of lipidoids is described in literature (see Mahon et al., Bioconjug. Chem. 2010 21:1448-1454; Schroeder et al., J Intern Med. 2010 267:9-21; Akinc et al., Nat Biotechnol. 2008 26:561-569; Love et al., Proc Natl Acad Sci USA. 2010 107:1864-1869; Siegwart et al., Proc Natl Acad Sci USA. 2011 108:12996-3001; all of which are incorporated herein in their entireties).

[0677] Formulations with the different lipidoids, including, but not limited to penta[3-(1-laurylaminopropionyl)]-triethylenetetramine hydrochloride (TETA-SLAP; also known as 98N12-5, see Murugaiah et al., Analytical Biochemistry, 401:61 (2010)), C₁₂₋₂₀₀ (including derivatives and variants), and MD1, can be tested for in vivo activity. The lipidoid “98N12-5” is disclosed by Akinc et al., Mol Ther. 2009 17:872-879. The lipidoid “C12-200” is disclosed by Love et al., Proc Natl Acad Sci USA. 2010 107:1864-1869 and Liu and Huang, Molecular Therapy. 2010 669-670. Each of the references is herein incorporated by reference in its entirety.

[0678] In one embodiment, the polynucleotides described herein can be formulated in an aminoalcohol lipidoid. Aminoalcohol lipidoids can be prepared by the methods described in U.S. Pat. No. 8,450,298 (herein incorporated by reference in its entirety).

[0679] The lipidoid formulations can include particles comprising either 3 or 4 or more components in addition to polynucleotides. Lipidoids and polynucleotide formulations comprising lipidoids are described in Intl. Pub. No. WO 2015051214 (herein incorporated by reference in its entirety.

[0680] c. Hyaluronidase

[0681] In some embodiments, the polynucleotides described herein (e.g., a polynucleotide comprising a nucleotide sequence encoding a wound healing polypeptide) and hyaluronidase for injection (e.g., intramuscular or subcutaneous injection). Hyaluronidase catalyzes the hydrolysis of hyaluronan, which is a constituent of the interstitial barrier. Hyaluronidase lowers the viscosity of hyaluronan, thereby increases tissue permeability (Frost, Expert Opin. Drug Deliv. (2007) 4:427-440). Alternatively, the hyaluronidase can be used to increase the number of cells exposed to the polynucleotides administered intramuscularly, or subcutaneously.

[0682] Nanoparticle Mimics

[0683] In some embodiments, the polynucleotides described herein (e.g., a polynucleotide comprising a nucleotide sequence encoding a wound healing polypeptide) is encapsulated within and/or absorbed to a nanoparticle mimic. A nanoparticle mimic can mimic the delivery function organisms or particles such as, but not limited to, pathogens, viruses, bacteria, fungus, parasites, prions and cells. As a non-limiting example, the polynucleotides described herein can be encapsulated in a non-viron particle that can mimic the delivery function of a virus (see e.g., Intl. Pub. No. WO2012006376 and U.S. Pub. Nos. US20130171241 and US20130195968, each of which is herein incorporated by reference in its entirety).

[0684] e. Self-Assembled Nanoparticles, or Self-Assembled Macromolecules

[0685] In some embodiments, the compositions or formulations of the present disclosure comprise the polynucleotides described herein (e.g., a polynucleotide comprising a nucleotide sequence encoding a wound healing polypeptide) in self-assembled nanoparticles, or amphiphilic macromolecules (AMs) for delivery. AMs comprise biocompatible amphiphilic polymers that have an alkylated sugar backbone covalently linked to poly(ethylene glycol). In aqueous solution, the AMs self-assemble to form micelles. Nucleic acid self-assembled nanoparticles are described in Intl. Appl. No. PCT/US2014/027077, and AMs and methods of forming AMs are described in U.S. Pub. No. US20130217753, each of which is herein incorporated by reference in its entirety.

[0686] f. Cations and Anions

[0687] In some embodiments, the compositions or formulations of the present disclosure comprise the polynucleotides described herein (e.g., a polynucleotide comprising a nucleotide sequence encoding a wound healing polypeptide) and a cation or anion, such as Zn²⁺, Ca²⁺, Cu²⁺, Mg²⁺ and combinations thereof. Exemplary formulations can include polymers and a polynucleotide complexed with a metal cation as described in, e.g., U.S. Pat. Nos. 6,265,389 and 6,555,525, each of which is herein incorporated by reference in its entirety. In some embodiments, cationic nanoparticles can contain a combination of divalent and monovalent cations. The delivery of polynucleotides in cationic nanoparticles or in one or more depot comprising cationic nanoparticles can improve polynucleotide bioavailability by acting as a long-acting depot and/or reducing the rate of degradation by nucleases.

[0688] g. Amino Acid Lipids

[0689] In some embodiments, the compositions or formulations of the present disclosure comprise the polynucleotides described herein (e.g., a polynucleotide comprising a nucleotide sequence encoding a wound healing polypeptide) that is formulation with an amino acid lipid. Amino acid lipids are lipophilic compounds comprising an amino acid residue and one or more lipophilic tails. Non-limiting examples of amino acid lipids and methods of making amino acid lipids are described in U.S. Pat. No. 8,501,824. The amino acid lipid formulations can deliver a polynucleotide in releasable form that comprises an amino acid lipid that binds and releases the polynucleotides. As a non-limiting example, the release of the polynucleotides described herein can be provided by an acid-labile linker as described in, e.g., U.S. Pat. Nos. 7,098,032, 6,897,196, 6,426,086, 7,138,382, 5,563,250, and 5,505,931, each of which is herein incorporated by reference in its entirety.

[0690] h. Interpolyelectrolyte Complexes

[0691] In some embodiments, the compositions or formulations of the present disclosure comprise the polynucleotides described herein (e.g., a polynucleotide comprising a nucleotide sequence encoding a wound healing polypeptide) in an interpolyelectrolyte complex. Interpolyelectrolyte complexes are formed when charge-dynamic polymers are complexed with one or more anionic molecules. Non-limiting examples of charge-dynamic polymers and interpolyelectrolyte complexes and methods of making interpolyelectrolyte complexes are described in U.S. Pat. No. 8,524,368, herein incorporated by reference in its entirety.

[0692] Crystalline Polymeric Systems

[0693] In some embodiments, the compositions or formulations of the present disclosure comprise the polynucleotides described herein (e.g., a polynucleotide comprising a nucleotide sequence encoding a wound healing polypeptide) in crystalline polymeric systems. Crystalline polymeric systems are polymers with crystalline moieties and/or terminal units comprising crystalline moieties. Exemplary polymers are described in U.S. Pat. No. 8,524,259 (herein incorporated by reference in its entirety).

[0694] j. Polymers, Biodegradable Nanoparticles, and Core-Shell Nanoparticles

[0695] In some embodiments, the compositions or formulations of the present disclosure comprise the polynucleotides described herein (e.g., a polynucleotide comprising a nucleotide sequence encoding a wound healing polypeptide) and a natural and/or synthetic polymer. The polymers include, but not limited to, polyethenes, polyethylene glycol (PEG), poly(l-lysine)(PLL), PEG grafted to PLL, cationic lipopolymer, biodegradable cationic lipopolymer, polyethyleneimine (PEI), cross-linked branched poly(alkylene imines), a polyamine derivative, a modified poloxamer, elastic biodegradable polymer, biodegradable copolymer, biodegradable polyester copolymer, biodegradable polyester copolymer, multiblock copolymers, poly[α-(4-aminobutyl)-L-glycolic acid) (PAGA), biodegradable cross-linked cationic multi-block copolymers, polycarbonates, polyanhydrides, polyhydroxyacids, polypropylfumerates, polycaprolactones, polyamides, polyacetals, polyethers, polyesters, poly(orthoesters), polycyanoacrylates, polyvinyl alcohols, polyurethanes, polyphosphazenes, polyureas, polystyrenes, polyamines, polylysine, poly(ethylene imine), poly(serine ester), poly(L-lactide-co-L-lysine), poly(4-hydroxy-L-proline ester), amine-containing polymers, dextran polymers, dextran polymer derivatives or combinations thereof.

[0696] Exemplary polymers include, DYNAMIC POLYCONJUGATE® (Arrowhead Research Corp., Pasadena, Calif.) formulations from MIRUS® Bio (Madison, Wis.) and Roche Madison (Madison, Wis.), PHASERX™ polymer formulations such as, without limitation, SMARTT POLYMER TECHNOLOGY™ (PHASERX®, Seattle, Wash.), DMRI/DOPE, poloxamer, VAXFECTIN® adjuvant from Vical (San Diego, Calif.), chitosan, cyclodextrin from Calando Pharmaceuticals (Pasadena, Calif.), dendrimers and poly(lactic-co-glycolic acid) (PLGA) polymers. RONDEL™ (RNAi/Oligonucleotide Nanoparticle Delivery) polymers (Arrowhead Research Corporation, Pasadena, Calif.) and pH responsive co-block polymers such as PHASERX® (Seattle, Wash.).

[0697] The polymer formulations allow a sustained or delayed release of the polynucleotide (e.g., following intramuscular or subcutaneous injection). The altered release profile for the polynucleotide can result in, for example, translation of an encoded protein over an extended period of time. The polymer formulation can also be used to increase the stability of the polynucleotide. Sustained release formulations can include, but are not limited to, PLGA microspheres, ethylene vinyl acetate (EVAc), poloxamer, GELSITE® (Nanotherapeutics, Inc. Alachua, Fla.), HYLENEX® (Halozyme Therapeutics, San Diego Calif.), surgical sealants such as fibrinogen polymers (Ethicon Inc. Cornelia, Ga.), TISSELL® (Baxter International, Inc. Deerfield, Ill.), PEG-based sealants, and COSEAL® (Baxter International, Inc. Deerfield, Ill.).

[0698] As a non-limiting example modified mRNA can be formulated in PLGA microspheres by preparing the PLGA microspheres with tunable release rates (e.g., days and weeks) and encapsulating the modified mRNA in the PLGA microspheres while maintaining the integrity of the modified mRNA during the encapsulation process. EVAc are non-biodegradable, biocompatible polymers that are used extensively in pre-clinical sustained release implant applications (e.g., extended release products Ocusert a pilocarpine ophthalmic insert for glaucoma or progestasert a sustained release progesterone intrauterine device; transdermal delivery systems Testoderm, Duragesic and Selegiline; catheters). Poloxamer F-407 NF is a hydrophilic, non-ionic surfactant triblock copolymer of polyoxyethylene-polyoxypropylene-polyoxyethylene having a low viscosity at temperatures less than 5° C. and forms a solid gel at temperatures greater than 15° C.

[0699] As a non-limiting example, the polynucleotides described herein can be formulated with the polymeric compound of PEG grafted with PLL as described in U.S. Pat. No. 6,177,274. As another non-limiting example, the polynucleotides described herein can be formulated with a block copolymer such as a PLGA-PEG block copolymer (see e.g., U.S. Pub. No. US20120004293 and U.S. Pat. Nos. 8,236,330 and 8,246,968), or a PLGA-PEG-PLGA block copolymer (see e.g., U.S. Pat. No. 6,004,573). Each of the references is herein incorporated by reference in its entirety.

[0700] In some embodiments, the polynucleotides described herein can be formulated with at least one amine-containing polymer such as, but not limited to polylysine, polyethylene imine, poly(amidoamine) dendrimers, poly(amine-co-esters) or combinations thereof. Exemplary polyamine polymers and their use as delivery agents are described in, e.g., U.S. Pat. Nos. 8,460,696, 8,236,280, each of which is herein incorporated by reference in its entirety.

[0701] In some embodiments, the polynucleotides described herein can be formulated in a biodegradable cationic lipopolymer, a biodegradable polymer, or a biodegradable copolymer, a biodegradable polyester copolymer, a biodegradable polyester polymer, a linear biodegradable copolymer, PAGA, a biodegradable cross-linked cationic multi-block copolymer or combinations thereof as described in, e.g., U.S. Pat. Nos. 6,696,038, 6,517,869, 6,267,987, 6,217,912, 6,652,886, 8,057,821, and 8,444,992; U.S. Pub. Nos. US20030073619, US20040142474, US20100004315, US2012009145 and US20130195920; and Intl Pub. Nos. WO2006063249 and WO2013086322, each of which is herein incorporated by reference in its entirety.

[0702] In some embodiments, the polynucleotides described herein can be formulated in or with at least one cyclodextrin polymer as described in U.S. Pub. No. US20130184453. In some embodiments, the polynucleotides described herein can be formulated in or with at least one crosslinked cation-binding polymers as described in Intl. Pub. Nos. WO2013106072, WO2013106073 and WO2013106086. In some embodiments, the polynucleotides described herein can be formulated in or with at least PEGylated albumin polymer as described in U.S. Pub. No. US20130231287. Each of the references is herein incorporated by reference in its entirety.

[0703] In some embodiments, the polynucleotides disclosed herein can be formulated as a nanoparticle using a combination of polymers, lipids, and/or other biodegradable agents, such as, but not limited to, calcium phosphate. Components can be combined in a core-shell, hybrid, and/or layer-by-layer architecture, to allow for fine-tuning of the nanoparticle for delivery (Wang et al., Nat Mater. 2006 5:791-796; Fuller et al., Biomaterials. 2008 29:1526-1532; DeKoker et al., Adv Drug Deliv Rev. 2011 63:748-761; Endres et al., Biomaterials. 2011 32:7721-7731; Su et al., Mol Pharm. 2011 Jun. 6; 8(3):774-87; herein incorporated by reference in their entireties). As a non-limiting example, the nanoparticle can comprise a plurality of polymers such as, but not limited to hydrophilic-hydrophobic polymers (e.g., PEG-PLGA), hydrophobic polymers (e.g., PEG) and/or hydrophilic polymers (Intl. Pub. No. WO20120225129, herein incorporated by reference in its entirety).

[0704] The use of core-shell nanoparticles has additionally focused on a high-throughput approach to synthesize cationic cross-linked nanogel cores and various shells (Siegwart et al., Proc Natl Acad Sci USA. 2011 108:12996-13001; herein incorporated by reference in its entirety). The complexation, delivery, and internalization of the polymeric nanoparticles can be precisely controlled by altering the chemical composition in both the core and shell components of the nanoparticle. For example, the core-shell nanoparticles can efficiently deliver siRNA to mouse hepatocytes after they covalently attach cholesterol to the nanoparticle.

[0705] In some embodiments, a hollow lipid core comprising a middle PLGA layer and an outer neutral lipid layer containing PEG can be used to delivery of the polynucleotides as described herein. In some embodiments, the lipid nanoparticles can comprise a core of the polynucleotides disclosed herein and a polymer shell, which is used to protect the polynucleotides in the core. The polymer shell can be any of the polymers described herein and are known in the art. The polymer shell can be used to protect the polynucleotides in the core.

[0706] Core-shell nanoparticles for use with the polynucleotides described herein are described in U.S. Pat. No. 8,313,777 or Intl. Pub. No. WO2013124867, each of which is herein incorporated by reference in their entirety.

[0707] k. Peptides and Proteins

[0708] In some embodiments, the compositions or formulations of the present disclosure comprise the polynucleotides described herein (e.g., a polynucleotide comprising a nucleotide sequence encoding a wound healing polypeptide) that is formulated with peptides and/or proteins to increase transfection of cells by the polynucleotide, and/or to alter the biodistribution of the polynucleotide (e.g., by targeting specific tissues or cell types), and/or increase the translation of encoded protein (e.g., Intl. Pub. Nos. WO2012110636 and WO2013123298. In some embodiments, the peptides can be those described in U.S. Pub. Nos. US20130129726, US20130137644 and US20130164219. Each of the references is herein incorporated by reference in its entirety.

[0709] l. Conjugates

[0710] In some embodiments, the compositions or formulations of the present disclosure comprise the polynucleotides described herein (e.g., a polynucleotide comprising a nucleotide sequence encoding a wound healing polypeptide) that is covalently linked to a carrier or targeting group, or including two encoding regions that together produce a fusion protein (e.g., bearing a targeting group and therapeutic protein or peptide) as a conjugate. The conjugate can be a peptide that selectively directs the nanoparticle to neurons in a tissue or organism, or assists in crossing the blood-brain barrier.

[0711] The conjugates include a naturally occurring substance, such as a protein (e.g., human serum albumin (HSA), low-density lipoprotein (LDL), high-density lipoprotein (HDL), or globulin); an carbohydrate (e.g., a dextran, pullulan, chitin, chitosan, inulin, cyclodextrin or hyaluronic acid); or a lipid. The ligand can also be a recombinant or synthetic molecule, such as a synthetic polymer, e.g., a synthetic polyamino acid, an oligonucleotide (e.g., an aptamer). Examples of polyamino acids include polyamino acid is a polylysine (PLL), poly L-aspartic acid, poly L-glutamic acid, styrene-maleic acid anhydride copolymer, poly(L-lactide-co-glycolied) copolymer, divinyl ether-maleic anhydride copolymer, N-(2-hydroxypropyl)methacrylamide copolymer (HMPA), polyethylene glycol (PEG), polyvinyl alcohol (PVA), polyurethane, poly(2-ethylacryllic acid), N-isopropylacrylamide polymers, or polyphosphazine. Example of polyamines include: polyethylenimine, polylysine (PLL), spermine, spermidine, polyamine, pseudopeptide-polyamine, peptidomimetic polyamine, dendrimer polyamine, arginine, amidine, protamine, cationic lipid, cationic porphyrin, quaternary salt of a polyamine, or an alpha helical peptide.

[0712] In some embodiments, the conjugate can function as a carrier for the polynucleotide disclosed herein. The conjugate can comprise a cationic polymer such as, but not limited to, polyamine, polylysine, polyalkylenimine, and polyethylenimine that can be grafted to with poly(ethylene glycol). Exemplary conjugates and their preparations are described in U.S. Pat. No. 6,586,524 and U.S. Pub. No. US20130211249, each of which herein is incorporated by reference in its entirety.

[0713] The conjugates can also include targeting groups, e.g., a cell or tissue targeting agent, e.g., a lectin, glycoprotein, lipid or protein, e.g., an antibody, that binds to a specified cell type such as a kidney cell. A targeting group can be a thyrotropin, melanotropin, lectin, glycoprotein, surfactant protein A, Mucin carbohydrate, multivalent lactose, multivalent galactose, N-acetyl-galactosamine, N-acetyl-glucosamine multivalent mannose, multivalent fucose, glycosylated polyaminoacids, multivalent galactose, transferrin, bisphosphonate, polyglutamate, polyaspartate, a lipid, cholesterol, a steroid, bile acid, folate, vitamin B12, biotin, an RGD peptide, an RGD peptide mimetic or an aptamer.

[0714] Targeting groups can be proteins, e.g., glycoproteins, or peptides, e.g., molecules having a specific affinity for a co-ligand, or antibodies e.g., an antibody, that binds to a specified cell type such as an endothelial cell or bone cell. Targeting groups can also include hormones and hormone receptors. They can also include non-peptidic species, such as lipids, lectins, carbohydrates, vitamins, cofactors, multivalent lactose, multivalent galactose, N-acetyl-galactosamine, N-acetyl-glucosamine multivalent mannose, multivalent frucose, or aptamers. The ligand can be, for example, a lipopolysaccharide, or an activator of p38 MAP kinase.

[0715] The targeting group can be any ligand that is capable of targeting a specific receptor. Examples include, without limitation, folate, GalNAc, galactose, mannose, mannose-6P, apatamers, integrin receptor ligands, chemokine receptor ligands, transferrin, biotin, serotonin receptor ligands, PSMA, endothelin, GCPII, somatostatin, LDL, and HDL ligands. In particular embodiments, the targeting group is an aptamer. The aptamer can be unmodified or have any combination of modifications disclosed herein. As a non-limiting example, the targeting group can be a glutathione receptor (GR)-binding conjugate for targeted delivery across the blood-central nervous system barrier as described in, e.g., U.S. Pub. No. US2013021661012 (herein incorporated by reference in its entirety).

[0716] In some embodiments, the conjugate can be a synergistic biomolecule-polymer conjugate, which comprises a long-acting continuous-release system to provide a greater therapeutic efficacy. The synergistic biomolecule-polymer conjugate can be those described in U.S. Pub. No. US20130195799. In some embodiments, the conjugate can be an aptamer conjugate as described in Intl. Pat. Pub. No. WO2012040524. In some embodiments, the conjugate can be an amine containing polymer conjugate as described in U.S. Pat. No. 8,507,653. Each of the references is herein incorporated by reference in its entirety. In some embodiments, the polynucleotides can be conjugated to SMARTT POLYMER TECHNOLOGY® (PHASERX®, Inc. Seattle, Wash.).

[0717] In some embodiments, the polynucleotides described herein are covalently conjugated to a cell penetrating polypeptide, which can also include a signal sequence or a targeting sequence. The conjugates can be designed to have increased stability, and/or increased cell transfection; and/or altered the biodistribution (e.g., targeted to specific tissues or cell types).

[0718] In some embodiments, the polynucleotides described herein can be conjugated to an agent to enhance delivery. In some embodiments, the agent can be a monomer or polymer such as a targeting monomer or a polymer having targeting blocks as described in Intl. Pub. No. WO2011062965. In some embodiments, the agent can be a transport agent covalently coupled to a polynucleotide as described in, e.g., U.S. Pat. Nos. 6,835.393 and 7,374,778. In some embodiments, the agent can be a membrane barrier transport enhancing agent such as those described in U.S. Pat. Nos. 7,737,108 and 8,003,129. Each of the references is herein incorporated by reference in its entirety.

### 22. METHODS OF USE

[0719] The polynucleotides, pharmaceutical compositions and formulations described herein are used in the preparation, manufacture and therapeutic use of a medicament to: (i) promote and/or improve wound healing, (ii) prevent and/or reduce scar formation at a wound, (iii) reduce the visibility of a scar in a subject in need thereof; and/or (iv) treat diseases that result in wounds or chronic skin pathology owing to lack of or reduced levels of a wound healing polypeptide, e.g., as in the case of epidermolysis bullosa.

[0720] In some embodiments, the polynucleotides, pharmaceutical compositions and formulations of the invention are used in methods for increasing the levels of wound healing polypeptides in a subject in need thereof. In some embodiments, the polynucleotides, pharmaceutical compositions and formulations of the invention are used in methods for increasing the levels of wound healing polypeptides in a subject in need thereof.

[0721] For instance, one aspect of the invention provides a method of promoting and/or improving wound healing in a subject comprising the intradermal (e.g., using microneedles) or topical administration of a composition or formulation comprising a polynucleotide encoding a wound healing polypeptide to that subject (e.g., an mRNA encoding a wound healing polypeptide).

[0722] As used herein, the term “topical administration” refers to application of a composition or formulation of the invention to the skin, e.g., to intact or broken skin. If the skin is broken, the term “topical” covers contacting a composition or formulation with the surface of the wound, rather than a particular layer of the skin. In a preferred embodiment, the skin is broken, either from the wound itself or by abrading the skin gently prior to application of the composition or formulation. In one embodiment, the wound is the result of an accident, e.g., an abrasion, a puncture, a laceration, or an ulcer. In one embodiment, the wound is the result of a surgical procedure.

[0723] As used herein, the term “intradermal” refers to application of the compounds of formulations of the invention into the dermis, i.e., between the epidermis and the hypodermis. The compounds or formulations of the invention may be injected intradermally using known methods, e.g using microneedles.

[0724] In another embodiment, the wound is a chronic wound, e.g., a wound that has not healed three months after the wound is received. In one embodiment, the wound is an acute wound.

[0725] Another aspect of the invention provides a method of preventing and/or reducing scar formation at a wound in a subject comprising the intradermal (e.g., using microneedles) or topical administration of a composition or formulation comprising a polynucleotide encoding a wound healing polypeptide to that subject (e.g., an mRNA encoding a wound healing polypeptide).

[0726] Another aspect of the invention provides a method of reducing the visibility of a scar in a subject comprising the intradermal (e.g., using microneedles) or topical administration of a composition or formulation comprising a polynucleotide encoding a wound healing polypeptide to that subject (e.g., an mRNA encoding a wound healing polypeptide).

[0727] Yet another aspect of the invention provides a method of treatment of epidermolysis bullosa in a subject in need thereof comprising the intradermal (e.g., using microneedles) or topical administration of a composition or formulation comprising a polynucleotide encoding a wound healing polypeptide to that subject (e.g., an mRNA encoding a wound healing polypeptide), wherein the wound healing polypeptide is a collagen. In certain embodiments, the epidermolysis bullosa is epidermolysis bullosa simplex. In some embodiments, the epidermolysis bullosa is junctional epidermolysis bullosa. In some embodiments, the epidermolysis bullosa is dystrophic epidermolysis bullosa.

[0728] The level of wound healing polypeptides in wounds (e.g., acute or chronic wounds) may be decreased. Thus, increasing the level of wound healing polypeptides in a wound is a potential treatment for: (i) promoting and/or improving wound healing, (ii) preventing and/or reducing scar formation at a wound, (iii) reducing the visibility of a scar, and/or (iv) treatment of epidermolysis bullosa. Thus, in certain aspects of the invention, the polynucleotides, e.g., mRNA, disclosed herein comprise one or more sequences encoding a wound healing polypeptide that is suitable for use in (i) promoting and/or improving wound healing, (ii) preventing and/or reducing scar formation at a wound, (iii) reducing the visibility of a scar, and/or (iv) treatment of epidermolysis bullosa. In some embodiments, the present disclosure treats a lack of wound healing polypeptide or wound healing polypeptide activity, or decreased or abnormal wound healing polypeptide activity in a subject by providing a polynucleotide, e.g., mRNA, that encodes a wound healing polypeptide to the subject. In some embodiments, the polynucleotide is sequence-optimized. In some embodiments, the polynucleotide (e.g., an mRNA) comprises a nucleic acid sequence (e.g., an ORF) encoding a wound healing polypeptide, wherein the nucleic acid is sequence-optimized, e.g., by modifying its G/C, uridine, or thymidine content, and/or the polynucleotide comprises at least one chemically modified nucleoside. In some embodiments, the polynucleotide comprises a miRNA binding site, e.g., a miRNA binding site that binds miRNA-142 and/or a miRNA binding site that binds miRNA-126.

[0729] In some embodiments, the intradermal (e.g., using microneedles) or topical administration of the polynucleotide, pharmaceutical composition or formulation of the invention results in expression of wound healing polypeptide in cells of the subject. In some embodiments, intradermally (e.g., using microneedles) or topically administering the polynucleotide, pharmaceutical composition or formulation of the invention results in an increase of expression and/or activity of the wound healing polypeptide in the subject. For example, in some embodiments, the polynucleotides of the present invention are used in methods of intradermally (e.g., using microneedles) or topically administering a composition or formulation comprising an mRNA encoding a wound healing polypeptide to a subject, wherein the method results in an increase of expression and/or activity of the wound healing polypeptide in at least some cells of a subject.

[0730] In some embodiments, the intradermal (e.g., using microneedles) or topical administration of a composition or formulation comprising an mRNA encoding a wound healing polypeptide to a subject results in an increase of expression and/or activity of the wound healing polypeptide in cells subject to a level at least 10%, at least 15%, at least 20%, at least 25%, at least 30%, at least 35%, at least 40%, at least 45%, at least 50%, at least 55%, at least 60%, at least 65%, at least 70%, at least 75%, at least 80%, at least 85%, at least 90%, at least 95%, or to 100% or more of the expression and/or activity level expected in a normal subject, e.g., a human not suffering from a wound.

[0731] In some embodiments, the intradermal (e.g., using microneedles) or topical administration of the polynucleotide, pharmaceutical composition or formulation of the invention results in expression of the wound healing protein in at least some of the cells of a subject that persists for a period of time sufficient to allow significant wound healing to occur.

[0732] In some embodiments, the expression of the encoded polypeptide is increased. In some embodiments, the polynucleotide increases expression and/or activity levels of the wound healing polypeptide in cells when introduced into those cells, e.g., by at least 10%, at least 15%, at least 20%, at least 25%, at least 30%, at least 35%, at least 40%, at least 45%, at least 50%, at least 55%, at least 60%, at least 65%, at least 70%, at least 75%, at least 80%, at least 85%, at least 90%, at least 95%, or to 100% with respect to the wound healing polypeptide expression and/or activity level in the cells before the polypeptide is introduced in the cells.

[0733] Other aspects of the present disclosure relate to transplantation of cells containing polynucleotides to a mammalian subject, e.g., a subject having a wound or other condition that would benefit from increased expression of wound healing polypeptides. Administration of cells to mammalian subjects is known to those of ordinary skill in the art, and includes, but is not limited to, local implantation (e.g., intradermal (e.g., using microneedles), topical or subcutaneous administration), organ delivery or systemic injection (e.g., intravenous injection or inhalation), and the formulation of cells in pharmaceutically acceptable carriers.

[0734] The present disclosure also provides methods to increase activity of a wound healing polypeptide in a subject in need thereof, e.g., a subject with a wound, comprising intradermally (e.g., using microneedles) or topically administering to the subject a therapeutically effective amount of a composition or formulation comprising mRNA encoding a wound healing polypeptide disclosed herein, e.g., a human wound healing polypeptide described in Table 1, a mutant thereof, or a fusion protein comprising a human wound healing polypeptide described in Table 1.

[0735] In some aspects, the wound healing polypeptide activity measured after intradermal (e.g., using microneedles) or topical administration to a subject in need thereof, e.g., a subject with a wound, is at least the normal wound healing polypeptide activity level observed in healthy human subjects. In some aspects, the wound healing polypeptide activity measured after intradermal (e.g., using microneedles) or topical administration is at higher than the wound healing polypeptide activity level observed in wounded patients. In some aspects, the increase in wound healing polypeptide activity in a subject in need thereof, e.g., a subject with a wound, after intradermally (e.g., using microneedles) or topically administering to the subject a therapeutically effective amount of a composition or formulation comprising mRNA encoding a wound healing polypeptide disclosed herein is at least about 5, 10, 15, 20, 25, 30, 35, 40, 45, 50, 55, 60, 65, 70, 75, 80, 85, 90, 95, 100, or greater than 100 percent of the normal wound healing polypeptide activity level observed in healthy human subjects. In some aspects, the increase in wound healing polypeptide activity above the wound healing polypeptide activity level observed in wounded patients after intradermally (e.g., using microneedles) or topically administering to the subject a composition or formulation comprising an mRNA encoding a wound healing polypeptide disclosed herein (e.g., after a single dose intradermal (e.g., using microneedles) or topical administration) is maintained for at least 1 day, 2 days, 3 days, 4 days, 5 days, 6 days, 7 days, 8 days, 9 days, 10 days, 12 days, 14 days, 21 days, or 28 days.

[0736] In some embodiments, the polynucleotides (e.g., mRNA), pharmaceutical compositions and formulations used in the methods of the invention comprise a uracil-modified sequence encoding a wound healing polypeptide disclosed herein and a miRNA binding site disclosed herein, e.g., a miRNA binding site that binds to miR-142 and/or a miRNA binding site that binds to miR-126. In some embodiments, the uracil-modified sequence encoding a wound healing polypeptide comprises at least one chemically modified nucleobase, e.g., N1-methylpseudouracil or 5-methoxyuracil. In some embodiments, at least 95% of a type of nucleobase (e.g., uracil) in a uracil-modified sequence encoding a wound healing polypeptide of the invention are modified nucleobases. In some embodiments, at least 95% of uracil in a uracil-modified sequence encoding a wound healing polypeptide is 1-N-methylpseudouridine or 5-methoxyuridine. In some embodiments, the polynucleotide (e.g., a RNA, e.g., a mRNA) disclosed herein is formulated with a delivery agent comprising, e.g., a compound having the Formula (I), e.g., any of Compounds 1-232, e.g., Compound II; a compound having the Formula (III), (IV), (V), or (VI), e.g., any of Compounds 233-342, e.g., Compound VI; or a compound having the Formula (VIII), e.g., any of Compounds 419-428, e.g., Compound I, or any combination thereof. In some embodiments, the delivery agent comprises Compound II, DSPC, Cholesterol, and Compound I or PEG-DMG, e.g., with a mole ratio of about 47.5:10.5:39.0:3.0 or about 50:10:38.5:1.5. In some embodiments, the delivery agent comprises Compound VI, DSPC, Cholesterol, and Compound I or PEG-DMG, e.g., with a mole ratio in the range of about 30 to about 60 mol % Compound II or VI (or related suitable amino lipid) (e.g., 30-40, 40-45, 45-50, 50-55 or 55-60 mol % Compound II or VI (or related suitable amino lipid)), about 5 to about 20 mol % phospholipid (or related suitable phospholipid or “helper lipid”) (e.g., 5-10, 10-15, or 15-20 mol % phospholipid (or related suitable phospholipid or “helper lipid”)), about 20 to about 50 mol % cholesterol (or related sterol or “non-cationic” lipid) (e.g., about 20-30, 30-35, 35-40, 40-45, or 45-50 mol % cholesterol (or related sterol or “non-cationic” lipid)) and about 0.05 to about 10 mol % PEG lipid (or other suitable PEG lipid) (e.g., 0.05-1, 1-2, 2-3, 3-4, 4-5, 5-7, or 7-10 mol % PEG lipid (or other suitable PEG lipid)). An exemplary delivery agent can comprise mole ratios of, for example, 47.5:10.5:39.0:3.0 or 50:10:38.5:1.5. In certain instances, an exemplary delivery agent can comprise mole ratios of, for example, 47.5:10.5:39.0:3; 47.5:10:39.5:3; 47.5:11:39.5:2; 47.5:10.5:39.5:2.5; 47.5:11:39:2.5; 48.5:10:38.5:3; 48.5:10.5:39:2; 48.5:10.5:38.5:2.5; 48.5:10.5:39.5:1.5; 48.5:10.5:38.0:3; 47:10.5:39.5:3; 47:10:40.5:2.5; 47:11:40:2; 47:10.5:39.5:3; 48:10.5:38.5:3; 48:10:39.5:2.5; 48:11:39:2; or 48:10.5:38.5:3. In some embodiments, the delivery agent comprises Compound II or VI, DSPC, Cholesterol, and Compound I or PEG-DMG, e.g., with a mole ratio of about 47.5:10.5:39.0:3.0. In some embodiments, the delivery agent comprises Compound II or VI, DSPC, Cholesterol, and Compound I or PEG-DMG, e.g., with a mole ratio of about 47.5:10.5:39.0:3.0 or about 50:10:38.5:1.5.

[0737] The skilled artisan will appreciate that the therapeutic effectiveness of a drug or a treatment of the instant invention can be characterized or determined by measuring the level of expression of an encoded protein in a sample or in samples taken from a subject (e.g., from a preclinical test subject (rodent, primate, etc.) or from a clinical subject (human). Likewise, the therapeutic effectiveness of a drug or a treatment of the instant invention can be characterized or determined by measuring the level of activity of an encoded protein (e.g., enzyme) in a sample or in samples taken from a subject (e.g., from a preclinical test subject (rodent, primate, etc.) or from a clinical subject (human). Furthermore, the therapeutic effectiveness of a drug or a treatment of the instant invention can be characterized or determined by measuring the level of an appropriate biomarker in sample(s) taken from a subject. Levels of protein and/or biomarkers can be determined post-administration with a single dose of an mRNA therapeutic of the invention or can be determined and/or monitored at several time points following intradermal (e.g., using microneedles) or topical administration with a single dose or can be determined and/or monitored throughout a course of treatment, e.g., a multi-dose treatment.

### Wound Healing Protein Expression Levels

[0738] Certain aspects of the invention feature measurement, determination and/or monitoring of the expression level or levels of a wound healing protein in a subject, for example, in an animal (e.g., rodents, primates, and the like) or in a human subject. Animals include normal, healthy or wild type animals, as well as animal models for use in understanding wound healing and treatments thereof. Exemplary animal models include rodent models, for example, diabetic and venous hypertension mouse models, and a porcine pressure ulcer model.

[0739] Wound healing protein expression levels can be measured or determined by any art-recognized method for determining protein levels in biological samples, e.g., from blood samples or a needle biopsy. The term “level” or “level of a protein” as used herein, preferably means the weight, mass or concentration of the protein within a sample or a subject. It will be understood by the skilled artisan that in certain embodiments the sample may be subjected, e.g., to any of the following: purification, precipitation, separation, e.g. centrifugation and/or HPLC, and subsequently subjected to determining the level of the protein, e.g., using mass and/or spectrometric analysis. In exemplary embodiments, enzyme-linked immunosorbent assay (ELISA) can be used to determine protein expression levels. In other exemplary embodiments, protein purification, separation and LC-MS can be used as a means for determining the level of a protein according to the invention. In some embodiments, an mRNA therapy of the invention (e.g., a single intradermal (e.g., using microneedles) or topical dose) results in increased wound healing protein expression levels in the tissue (e.g., liver) of the subject (e.g., 2-fold, 3-fold, 4-fold, 5-fold, 6-fold, 7-fold, 8-fold, 9-fold, 10-fold, 20-fold, 30-fold, 40-fold, 50-fold increase and/or increased to at least 50%, at least 60%, at least 70%, at least 75%, 80%, at least 85%, at least 90%, at least 95%, or at least 100% of normal levels) for at least 6 hours, at least 12 hours, at least 24 hours, at least 36 hours, at least 48 hours, at least 60 hours, at least 72 hours, at least 84 hours, at least 96 hours, at least 108 hours, at least 122 hours after intradermal (e.g., using microneedles) or topical administration of a single dose of the mRNA therapy.

### Wound Healing Protein Activity

[0740] In wounds (e.g., nonhealing wounds), the activity (e.g., signaling activity) of a wound healing polypeptide (see, e.g., Table 1) is reduced compared to a normal physiological activity level (e.g., in a healing wound). Further aspects of the invention feature measurement, determination and/or monitoring of the activity level(s) (e.g., signaling activity level(s)) of a wound healing polypeptide in a subject, for example, in an animal (e.g., rodent, primate, and the like) or in a human subject. Activity levels can be measured or determined by any art-recognized method for determining signaling activity levels in biological samples (e.g., analysis of downstream signaling protein levels, analysis of phosphorylation status, use of reporter assays). The term “activity level” or “signaling activity level” as used herein, preferably means the activity of the polypeptide per volume, mass or weight of sample or total protein within a sample. In exemplary embodiments, the “activity level” or “signaling activity level” is described in terms of units per milliliter of fluid (e.g., bodily fluid, e.g., serum, plasma, urine and the like) or is described in terms of units per weight of tissue or per weight of protein (e.g., total protein) within a sample.

[0741] In certain embodiments, an mRNA therapy of the invention features a pharmaceutical composition comprising a dose of mRNA effective to result in at least 1.5-fold, at least 2-fold, at least 3-fold, at least 4-fold, at least 5-fold, at least 10-fold, at least 25-fold, at least 50-fold, or at least 100-fold, from 1.5-fold to 100-fold, from 1.5 to 10-fold, from 10-fold to 50-fold increase in wound healing polypeptide activity in a tissue (e.g., the site of the wound or a site adjacent to the wound) from 6 to 12 hours, from 12 to 24 hours, from 24 to 48 hours, or from 48 to 72 hours post intradermal (e.g., using microneedles) or topical administration (e.g., at 48 or at 72 hours post intradermal (e.g., using microneedles) or topical administration) (e.g., as compared to the activity level of the wound healing polypeptide prior to intradermal (e.g., using microneedles) or topical administration of the pharmaceutical composition).

[0742] In exemplary embodiments, an mRNA therapy of the invention features a pharmaceutical composition comprising a single intradermal (e.g., using microneedles) or topical dose of mRNA that results in the above-described levels of activity. In another embodiment, an mRNA therapy of the invention features a pharmaceutical composition which can be administered in multiple single unit intradermal (e.g., using microneedles) or topical doses of mRNA that maintain the above-described levels of activity.

### Wound Healing Biomarkers

[0743] In some embodiments, the intradermal (e.g., using microneedles) or topical administration of an effective amount of a polynucleotide, pharmaceutical composition or formulation of the invention normalizes the levels of a biomarker of wound healing impairment (see, e.g., Lindley et al., 2016, Plast Reconstr Surg, 138(3):18S-28S for a summary of biomarkers of wound healing impairment). Nonlimiting examples of biomarkers of impaired wound healing include: (i) increased levels of beta-catenin, c-myc, ADAM12, miRNA-16, miRNA-20a, miRNA-21, miRNA-106a, miRNA-130a, miRNA-203, MMP1, MMP2, MMp3, MMP7, MMP8, MMP9, MMP10, MMP11, MMP13, IL1, IL6, and/or procalcitonin, (ii) decreased levels of BMPR, LRIG1, GATA3, IDR2,4, K15, cathelicidin, TGF-β I, II, and III ligands, phospho-smad2, TIMP1, CD34⁺/CD45-diminished circulating cells, HIF1-2, miRNA-200b, and/or miRNA-191, and (iii) increased cytoplasmic staining of EGFR. In some embodiments, the intradermal (e.g., using microneedles) or topical administration of the polynucleotide, pharmaceutical composition or formulation of the invention results in normalization of the level of one or more biomarkers of wound healing impairment within a short period of time after intradermal (e.g., using microneedles) or topical administration of the polynucleotide, pharmaceutical composition or formulation of the invention. Methods of determining the level of biomarkers are known in the art may be used in determining the level the biomarkers described herein.

[0744] In some embodiments, the level of one or more biomarkers of wound healing impairment is measured in wound tissue (e.g., debrided wound tissue or wound fluid). Methods of obtaining wound tissue (e.g., debrided wound tissue or wound fluid) and for measuring the level of biomarkers in wound tissue (e.g., debrided wound tissue or wound fluid) are known in the art. In some embodiments, the level of one or more biomarkers of wound healing impairment is measured in blood. In some embodiments, the level of one of more biomarkers of wound healing impairment is measured in a component of blood, for example in plasma or serum. Methods of obtaining blood and components of blood and for measuring the level of biomarkers in blood or a component of blood are known in the art. In some embodiments, the level of one or more biomarkers of wound healing impairment is measured in a dried blood spot. In embodiments where levels of wound healing impairment are determined in dried blood spots, the method of determination can be mass spectrometry methods known in the art. In some embodiments, the level of one or more biomarkers of wound healing impairment is measured in urine. Methods of obtaining urine and for measuring the level of biomarkers in urine are known in the art. In some embodiments, the level of one or more biomarkers of wound healing impairment is measured in bile. Methods of obtaining bile and for measuring the level of biomarkers in bile are known in the art. In some embodiments, the level of one or more biomarkers of wound healing impairment is measured in liver tissue. Methods of obtaining liver tissue, e.g. biopsy, and for measuring the level of biomarkers in liver tissue are known in the art.

[0745] Further aspects of the invention feature determining the level (or levels) of a biomarker determined in a sample as compared to a level (e.g., a reference level) of the same or another biomarker in another sample, e.g., from the same patient, from another patient, from a control and/or from the same or different time points, and/or a physiologic level, and/or an elevated level, and/or a supraphysiologic level, and/or a level of a control. The skilled artisan will be familiar with physiologic levels of biomarkers, for example, levels in normal or wild type animals, normal or healthy subjects, and the like, in particular, the level or levels characteristic of subjects who are healthy and/or normal functioning. As used herein, the phrase “elevated level” means amounts greater than normally found in a normal or wild type preclinical animal or in a normal or healthy subject, e.g. a human subject. As used herein, the term “supraphysiologic” means amounts greater than normally found in a normal or wild type preclinical animal or in a normal or healthy subject, e.g. a human subject, optionally producing a significantly enhanced physiologic response. As used herein, the term “comparing” or “compared to” preferably means the mathematical comparison of the two or more values, e.g., of the levels of the biomarker(s). It will thus be readily apparent to the skilled artisan whether one of the values is higher, lower or identical to another value or group of values if at least two of such values are compared with each other. Comparing or comparison to can be in the context, for example, of comparing to a control value, e.g., as compared to a reference blood, serum, plasma, and/or tissue (e.g., wound tissue) level of a biomarker of impaired wound healing, in said subject prior to intradermal (e.g., using microneedles) or topical administration (e.g., in a person suffering from a wound (e.g., a nonhealing wound)) or in a normal or healthy subject. Comparing or comparison to can also be in the context, for example, of comparing to a control value, e.g., as compared to a reference blood, serum, plasma and/or tissue (e.g., wound tissue) level of a biomarker of impaired wound healing in said subject prior to intradermal (e.g., using microneedles) or topical administration (e.g., in a person suffering from a wound (e.g., a nonhealing wound)) or in a normal or healthy subject.

[0746] As used herein, a “control” is preferably a sample from a subject wherein the wound healing status of said subject is known. In one embodiment, a control is a sample of a healthy patient. In another embodiment, the control is a sample from at least one subject having a known wound healing status, for example, a severe, mild, or healthy wound healing status, e.g. a control patient. In another embodiment, the control is a sample from a subject not being treated for wound healing. In a still further embodiment, the control is a sample from a single subject or a pool of samples from different subjects and/or samples taken from the subject(s) at different time points.

[0747] The term “level” or “level of a biomarker” as used herein, preferably means the mass, weight or concentration of a biomarker of the invention within a sample or a subject. It will be understood by the skilled artisan that in certain embodiments the sample may be subjected to, e.g., one or more of the following: substance purification, precipitation, separation, e.g. centrifugation and/or HPLC and subsequently subjected to determining the level of the biomarker, e.g. using mass spectrometric analysis. In certain embodiments, LC-MS can be used as a means for determining the level of a biomarker according to the invention.

[0748] The term “determining the level” of a biomarker as used herein can mean methods which include quantifying an amount of at least one substance in a sample from a subject, for example, in a bodily fluid from the subject (e.g., serum, plasma, urine, lymph, wound fluid etc.) or in a tissue of the subject (e.g., wound, etc.).

[0749] The term “reference level” as used herein can refer to levels (e.g., of a biomarker) in a subject prior to intradermal (e.g., using microneedles) or topical administration of an mRNA therapy of the invention (e.g., in a person suffering from a wound) or in a normal or healthy subject.

[0750] As used herein, the term “normal subject” or “healthy subject” refers to a subject not suffering from symptoms associated with a wound or wound healing impairment. In certain embodiments of the present invention, a sample from a healthy subject is used as a control sample, or the known or standardized value for the level of biomarker from samples of healthy or normal subjects is used as a control.

[0751] With respect to biomarkers of wound healing impairment that are elevated, increased, or higher compared to a baseline or reference level, in some embodiments, comparing the level of the biomarker in a sample from a subject in need of treatment for wound healing (e.g., wound healing impairment) or in a subject being treated for wound healing (e.g., wound healing impairment) to a control level of the biomarker comprises comparing the level of the biomarker in the sample from the subject (in need of treatment or being treated for wound healing) to a baseline or reference level, wherein if a level of the biomarker in the sample from the subject (in need of treatment or being treated for wound healing) is elevated, increased or higher compared to the baseline or reference level, this is indicative that the subject is suffering from wound healing impairment and/or is in need of treatment; and/or wherein if a level of the biomarker in the sample from the subject (in need of treatment or being treated for wound healing) is decreased or lower compared to the baseline level this is indicative that the subject is not suffering from, is successfully being treated for wound healing, or is not in need of treatment for wound healing. The stronger the reduction (e.g., at least 2-fold, at least 3-fold, at least 4-fold, at least 5-fold, at least 6-fold, at least 7-fold, at least 8-fold, at least 10-fold, at least 20-fold, at least-30 fold, at least 40-fold, at least 50-fold reduction and/or at least 10%, at least 20%, at least 30% at least 40%, at least 50%, at least 60%, at least 70%, at least 80%, at least 90%, or at least 100% reduction) of the level of a biomarker, within a certain time period, e.g., within 6 hours, within 12 hours, within 24 hours, within 36 hours, within 48 hours, within 60 hours, or within 72 hours, and/or for a certain duration of time, e.g., 48 hours, 72 hours, 96 hours, 120 hours, 144 hours, 1 week, 2 weeks, 3 weeks, 4 weeks, 1 month, 2 months, 3 months, 4 months, 5 months, 6 months, 7 months, 8 months, 9 months, 10 months, 11 months, 12 months, 18 months, 24 months, etc., the more successful is a therapy, such as for example an mRNA therapy of the invention (e.g., a single dose or a multiple regimen).

[0752] A reduction of at least about 20%, at least about 30%, at least about 40%, at least about 50%, at least about 60%, at least about 70%, at least about 80%, at least about 90%, at least 100% or more of the level of biomarker, in particular, in bodily fluid (e.g., plasma, serum, urine, e.g., urinary sediment, wound fluid) or in tissue(s) in a subject (e.g., wound tissue), within 1, 2, 3, 4, 5, 6 or more days following intradermal (e.g., using microneedles) or topical administration is indicative of a dose suitable for successful treatment of wound healing, wherein reduction as used herein, preferably means that the level of biomarker determined at the end of a specified time period (e.g., post-administration, for example, of a single intradermal (e.g., using microneedles) or topical dose) is compared to the level of the same biomarker determined at the beginning of said time period (e.g., pre-administration of said dose). Exemplary time periods include 12, 24, 48, 72, 96, 120 or 144 hours post-administration, in particular 24, 48, 72 or 96 hours post-administration.

[0753] A sustained reduction in substrate levels (e.g., biomarkers) is particularly indicative of mRNA therapeutic dosing and/or intradermal (e.g., using microneedles) or topical administration regimens successful for treatment of wound healing. Such sustained reduction can be referred to herein as “duration” of effect. In exemplary embodiments, a reduction of at least about 20%, at least about 30%, at least about 40%, at least about 50%, at least about 60%, at least about 65%, at least about 70%, at least about 75%, at least about 80%, at least about 85%, at least about 90%, or at least about 95% at least about 96%, at least about 97%, at least about 98%, at least about 99%, at least about 100% or more of the level of biomarker, in particular, in a bodily fluid (e.g., plasma, serum, urine, e.g., urinary sediment, wound fluid) or in tissue(s) in a subject (e.g., wound tissue), within 1, 2, 3, 4, 5, 6, 7, 8 or more days following intradermal (e.g., using microneedles) or topical administration is indicative of a successful therapeutic approach. In exemplary embodiments, sustained reduction in substrate (e.g., biomarker) levels in one or more samples (e.g., fluids and/or tissues) is preferred. For example, mRNA therapies resulting in sustained reduction in a biomarker, optionally in combination with sustained reduction of said biomarker in at least one tissue, preferably two, three, four, five or more tissues, is indicative of successful treatment.

[0754] With respect to biomarkers of wound healing impairment that are diminished, decreased, or lower compared to a baseline or reference level, in some embodiments, comparing the level of the biomarker in a sample from a subject in need of treatment for wound healing (e.g., wound healing impairment) or in a subject being treated for wound healing (e.g., wound healing impairment) to a control level of the biomarker comprises comparing the level of the biomarker in the sample from the subject (in need of treatment or being treated for wound healing) to a baseline or reference level, wherein if a level of the biomarker in the sample from the subject (in need of treatment or being treated for wound healing) is diminished, decreased, or lower compared to the baseline or reference level, this is indicative that the subject is suffering from wound healing impairment and/or is in need of treatment; and/or wherein if a level of the biomarker in the sample from the subject (in need of treatment or being treated for wound healing) is increased or higher compared to the baseline level this is indicative that the subject is not suffering from, is successfully being treated for wound healing, or is not in need of treatment for wound healing. The stronger the increase (e.g., at least 2-fold, at least 3-fold, at least 4-fold, at least 5-fold, at least 6-fold, at least 7-fold, at least 8-fold, at least 10-fold, at least 20-fold, at least-30 fold, at least 40-fold, at least 50-fold increase and/or at least 10%, at least 20%, at least 30% at least 40%, at least 50%, at least 60%, at least 70%, at least 80%, at least 90%, or at least 100% increase) of the level of a biomarker, within a certain time period, e.g., within 6 hours, within 12 hours, within 24 hours, within 36 hours, within 48 hours, within 60 hours, or within 72 hours, and/or for a certain duration of time, e.g., 48 hours, 72 hours, 96 hours, 120 hours, 144 hours, 1 week, 2 weeks, 3 weeks, 4 weeks, 1 month, 2 months, 3 months, 4 months, 5 months, 6 months, 7 months, 8 months, 9 months, 10 months, 11 months, 12 months, 18 months, 24 months, etc., the more successful is a therapy, such as for example an mRNA therapy of the invention (e.g., a single dose or a multiple regimen).

[0755] An increase of at least about 20%, at least about 30%, at least about 40%, at least about 50%, at least about 60%, at least about 70%, at least about 80%, at least about 90%, at least 100% or more of the level of biomarker, in particular, in bodily fluid (e.g., plasma, serum, urine, e.g., urinary sediment, wound fluid) or in tissue(s) in a subject (e.g., wound tissue), within 1, 2, 3, 4, 5, 6 or more days following intradermal (e.g., using microneedles) or topical administration is indicative of a dose suitable for successful treatment of wound healing, wherein increase as used herein, preferably means that the level of biomarker determined at the end of a specified time period (e.g., post-administration, for example, of a single intradermal (e.g., using microneedles) or topical dose) is compared to the level of the same biomarker determined at the beginning of said time period (e.g., pre-administration of said dose). Exemplary time periods include 12, 24, 48, 72, 96, 120 or 144 hours post-administration, in particular 24, 48, 72 or 96 hours post-administration.

[0756] A sustained increase in substrate levels (e.g., biomarkers) is particularly indicative of mRNA therapeutic dosing and/or intradermal (e.g., using microneedles) or topical administration regimens successful for treatment of wound healing. Such sustained increase can be referred to herein as “duration” of effect. In exemplary embodiments, an increase of at least about 20%, at least about 30%, at least about 40%, at least about 50%, at least about 60%, at least about 65%, at least about 70%, at least about 75%, at least about 80%, at least about 85%, at least about 90%, or at least about 95% at least about 96%, at least about 97%, at least about 98%, at least about 99%, at least about 100% or more of the level of biomarker, in particular, in a bodily fluid (e.g., plasma, serum, urine, e.g., urinary sediment, wound fluid) or in tissue(s) in a subject (e.g., wound tissue), within 1, 2, 3, 4, 5, 6, 7, 8 or more days following intradermal (e.g., using microneedles) or topical administration is indicative of a successful therapeutic approach. In exemplary embodiments, sustained increase in substrate (e.g., biomarker) levels in one or more samples (e.g., fluids and/or tissues) is preferred. For example, mRNA therapies resulting in sustained increase in a biomarker, optionally in combination with sustained increase of said biomarker in at least one tissue, preferably two, three, four, five or more tissues, is indicative of successful treatment.

[0757] In some embodiments, a single dose of an mRNA therapy of the invention is about 0.01 mg/kg to about 10 mg/kg of polynucleotide per subject body weight (mpk). In some embodiments, a single dose of an mRNA therapy of the invention is about 1 to 10 mpk, about 2 to 9 mpk, about 3 to 8 mpk, about 4 to 7 mpk, or about 5 to 6 mpk. In some embodiments, a single dose of an mRNA therapy of the invention is about 0.2 to about 0.8 mpk, about 0.3 to about 0.7 mpk, about 0.4 to about 0.8 mpk, or about 0.5 mpk. In another embodiment, a single dose of an mRNA therapy of the invention is less than 1.5 mpk, less than 1.25 mpk, less than 1 mpk, or less than 0.75 mpk.

### Scar Formation and Visibility

[0758] Certain aspects of the invention feature measurement, determination and/or monitoring of the visibility of a scar in a subject, for example, in an animal (e.g., rodents, primates, and the like) or in a human subject. Animals include normal, healthy or wild type animals, as well as animal models for use in understanding scar reduction and scar prevention treatments thereof.

[0759] The formation or visibility of a scar can be measured or determined by any art-recognized method for determining the reduction or visibility of a scar (see, e.g., Idriss & Maibach, 2009, Skin Research and Technology, 15:1-5). For example, the size, height, color, pliability, texture, surface area, and/or presence of hair at the site of a scar can be measured or determined and compared to the size, height, color, pliability, texture, surface area, and/or presence of hair at the site of a scar, respectively, prior to treatment. In some embodiments, an mRNA therapy of the invention (e.g., a single intradermal (e.g., using microneedles) or topical dose results in a decrease in the size, height, or surface area of a scar on the subject (e.g., a 2-fold, 3-fold, 4-fold, 5-fold, 6-fold, 7-fold, 8-fold, 9-fold, 10-fold, 20-fold, 30-fold, 40-fold, 50-fold decrease and/or decreased to at least 50%, at least 60%, at least 70%, at least 75%, 80%, at least 85%, at least 90%, at least 95%, or 100% of the size, height, or surface area, respectively, prior to mRNA therapy) at least 6 hours, at least 12 hours, at least 24 hours, at least 36 hours, at least 48 hours, at least 60 hours, at least 72 hours, at least 84 hours, at least 96 hours, at least 108 hours, at least 122 hours after intradermal (e.g., using microneedles) or topical administration of a single dose of the mRNA therapy. In some embodiments, an mRNA therapy of the invention (e.g., a single intradermal (e.g., using microneedles) or topical dose results in an increase in the pliability of or presence of hair on a scar on the subject (e.g., a 2-fold, 3-fold, 4-fold, 5-fold, 6-fold, 7-fold, 8-fold, 9-fold, 10-fold, 20-fold, 30-fold, 40-fold, 50-fold increase and/or increased to at least 50%, at least 60%, at least 70%, at least 75%, 80%, at least 85%, at least 90%, at least 95%, or 100% of the pliability of or presence of hair on, respectively, a scar prior to mRNA therapy) at least 6 hours, at least 12 hours, at least 24 hours, at least 36 hours, at least 48 hours, at least 60 hours, at least 72 hours, at least 84 hours, at least 96 hours, at least 108 hours, at least 122 hours after intradermal (e.g., using microneedles) or topical administration of a single dose of the mRNA therapy.

### 23. COMPOSITIONS AND FORMULATIONS FOR USE

[0760] Certain aspects of the invention are directed to compositions or formulations comprising any of the polynucleotides disclosed above. In certain embodiments, the compositions or formulations are for intradermal (e.g., using microneedles) or topical administration to a subject.

[0761] In some embodiments, the composition or formulation comprises:

[0762] (i) a polynucleotide (e.g., a RNA, e.g., an mRNA) comprising a sequence-optimized nucleotide sequence (e.g., an ORF) encoding a wound healing polypeptide (e.g., the wild-type sequence, functional fragment, or variant thereof), wherein the polynucleotide comprises at least one chemically modified nucleobase, e.g., N1-methylpseudouracil or 5-methoxyuracil (e.g., wherein at least about 25%, at least about 30%, at least about 40%, at least about 50%, at least about 60%, at least about 70%, at least about 80%, at least about 90%, at least about 95%, at least about 99%, or 100% of the uracils are N1-methylpseudouracils or 5-methoxyuracils), and wherein the polynucleotide further comprises a miRNA binding site, e.g., a miRNA binding site that binds to miR-142 (e.g., a miR-142-3p or miR-142-5p binding site) and/or a miRNA binding site that binds to miR-126 (e.g., a miR-126-3p or miR-126-5p binding site); and

[0763] (ii) a delivery agent comprising, e.g., a compound having the Formula (I), e.g., any of Compounds 1-232, e.g., Compound II; a compound having the Formula (III), (IV), (V), or (VI), e.g., any of Compounds 233-342, e.g., Compound VI; or a compound having the Formula (VIII), e.g., any of Compounds 419-428, e.g., Compound I, or any combination thereof. In some embodiments, the delivery agent is a lipid nanoparticle comprising Compound II, Compound VI, a salt or a stereoisomer thereof, or any combination thereof. In some embodiments, the delivery agent comprises Compound II, DSPC, Cholesterol, and Compound I or PEG-DMG, e.g., with a mole ratio of about 50:10:38.5:1.5. In some embodiments, the delivery agent comprises Compound II, DSPC, Cholesterol, and Compound I or PEG-DMG, e.g., with a mole ratio of about 47.5:10.5:39.0:3.0. In some embodiments, the delivery agent comprises Compound VI, DSPC, Cholesterol, and Compound I or PEG-DMG, e.g., with a mole ratio of about 50:10:38.5:1.5. In some embodiments, the delivery agent comprises Compound VI, DSPC, Cholesterol, and Compound I or PEG-DMG, e.g., with a mole ratio of about 47.5:10.5:39.0:3.0.

[0764] In some embodiments, the uracil or thymine content of the ORF relative to the theoretical minimum uracil or thymine content of a nucleotide sequence encoding the wound healing polypeptide (% U_{TM} or % T_{TM}), is between about 100% and about 150%.

[0765] In some embodiments, the polynucleotides, compositions, or formulations above are used to promote and/or increase wound healing.

[0766] In some embodiments, the polynucleotides, compositions, or formulations above are used to prevent and/or reduce scar formation at a wound.

[0767] In some embodiments, the polynucleotides, compositions, or formulations above are used to reduce the visibility of a scar in a subject in need thereof.

[0768] In some embodiments, the polynucleotides, compositions, or formulations above are used to treat epidermolysis bullosa.

### 24. FORMS OF ADMINISTRATION

[0769] The polynucleotides, pharmaceutical compositions and formulations of the invention described above can be administered intradermally (e.g., using microneedles) or topically. In some embodiments, a formulation for a intradermal (e.g., using microneedles) or topical administration can include at least one inactive ingredient.

[0770] The polynucleotides of the present invention (e.g., a polynucleotide comprising a nucleotide sequence encoding a wound healing polypeptide or a functional fragment or variant thereof) can be formulated, using the methods described herein. The formulations can contain polynucleotides that can be modified and/or unmodified. The formulations can further include, but are not limited to, cell penetration agents, a pharmaceutically acceptable carrier, a delivery agent, a bioerodible or biocompatible polymer, a solvent, and a sustained-release delivery depot. The formulated polynucleotides can be delivered to the cell using routes of administration known in the art and described herein (e.g., intradermal (e.g., using microneedles) or topical administration).

[0771] A pharmaceutical composition for intradermal (e.g., using microneedles) or topical administration can comprise at least one inactive ingredient. Any or none of the inactive ingredients used can have been approved by the US Food and Drug Administration (FDA).

### 25. KITS AND DEVICES

[0772] a. Kits

[0773] The invention provides a variety of kits for conveniently and/or effectively using the claimed nucleotides of the present invention. Typically, kits will comprise sufficient amounts and/or numbers of components to allow a user to perform multiple treatments of a subject(s) and/or to perform multiple experiments.

[0774] In one aspect, the present invention provides kits comprising the molecules (polynucleotides) of the invention.

[0775] Said kits can be for protein production, comprising a first polynucleotides comprising a translatable region. The kit can further comprise packaging and instructions and/or a delivery agent to form a formulation composition. The delivery agent can comprise a saline, a buffered solution, a lipidoid or any delivery agent disclosed herein.

[0776] In some embodiments, the buffer solution can include sodium chloride, calcium chloride, phosphate and/or EDTA. In another embodiment, the buffer solution can include, but is not limited to, saline, saline with 2 mM calcium, 5% sucrose, 5% sucrose with 2 mM calcium, 5% Mannitol, 5% Mannitol with 2 mM calcium, Ringer's lactate, sodium chloride, sodium chloride with 2 mM calcium and mannose (See, e.g., U.S. Pub. No. 20120258046; herein incorporated by reference in its entirety). In a further embodiment, the buffer solutions can be precipitated or it can be lyophilized. The amount of each component can be varied to enable consistent, reproducible higher concentration saline or simple buffer formulations. The components can also be varied in order to increase the stability of modified RNA in the buffer solution over a period of time and/or under a variety of conditions. In one aspect, the present invention provides kits for protein production, comprising: a polynucleotide comprising a translatable region, provided in an amount effective to produce a desired amount of a protein encoded by the translatable region when introduced into a target cell; a second polynucleotide comprising an inhibitory nucleic acid, provided in an amount effective to substantially inhibit the innate immune response of the cell; and packaging and instructions.

[0777] In one aspect, the present invention provides kits for protein production, comprising a polynucleotide comprising a translatable region, wherein the polynucleotide exhibits reduced degradation by a cellular nuclease, and packaging and instructions.

[0778] In one aspect, the present invention provides kits for protein production, comprising a polynucleotide comprising a translatable region, wherein the polynucleotide exhibits reduced degradation by a cellular nuclease, and a mammalian cell suitable for translation of the translatable region of the first nucleic acid.

[0779] b. Devices

[0780] The present invention provides for devices that can incorporate polynucleotides that encode polypeptides of interest. These devices contain in a stable formulation the reagents to synthesize a polynucleotide in a formulation available to be immediately delivered to a subject in need thereof, such as a human patient

[0781] Devices for intradermal (e.g., using microneedles) or topical administration can be employed to deliver the polynucleotides of the present invention according to single, multi- or split-dosing regimens taught herein. Such devices are taught in, for example, International Application Publ. No. WO2013151666, the contents of which are incorporated herein by reference in their entirety.

### 26. DEFINITIONS

[0782] In order that the present disclosure can be more readily understood, certain terms are first defined. As used in this application, except as otherwise expressly provided herein, each of the following terms shall have the meaning set forth below. Additional definitions are set forth throughout the application.

[0783] The invention includes embodiments in which exactly one member of the group is present in, employed in, or otherwise relevant to a given product or process. The invention includes embodiments in which more than one, or all of the group members are present in, employed in, or otherwise relevant to a given product or process.

[0784] In this specification and the appended claims, the singular forms “a”, “an” and “the” include plural referents unless the context clearly dictates otherwise. The terms “a” (or “an”), as well as the terms “one or more,” and “at least one” can be used interchangeably herein. In certain aspects, the term “a” or “an” means “single.” In other aspects, the term “a” or “an” includes “two or more” or “multiple.”

[0785] Furthermore, “and/or” where used herein is to be taken as specific disclosure of each of the two specified features or components with or without the other. Thus, the term “and/or” as used in a phrase such as “A and/or B” herein is intended to include “A and B,” “A or B,” “A” (alone), and “B” (alone). Likewise, the term “and/or” as used in a phrase such as “A, B, and/or C” is intended to encompass each of the following aspects: A, B, and C; A, B, or C; A or C; A or B; B or C; A and C; A and B; B and C; A (alone); B (alone); and C (alone).

[0786] Unless defined otherwise, all technical and scientific terms used herein have the same meaning as commonly understood by one of ordinary skill in the art to which this disclosure is related. For example, the Concise Dictionary of Biomedicine and Molecular Biology, Juo, Pei-Show, 2nd ed., 2002, CRC Press; The Dictionary of Cell and Molecular Biology, 3rd ed., 1999, Academic Press; and the Oxford Dictionary Of Biochemistry And Molecular Biology, Revised, 2000, Oxford University Press, provide one of skill with a general dictionary of many of the terms used in this disclosure.

[0787] Wherever aspects are described herein with the language “comprising,” otherwise analogous aspects described in terms of “consisting of” and/or “consisting essentially of” are also provided.

[0788] Units, prefixes, and symbols are denoted in their Système International de Unites (SI) accepted form. Numeric ranges are inclusive of the numbers defining the range. Where a range of values is recited, it is to be understood that each intervening integer value, and each fraction thereof, between the recited upper and lower limits of that range is also specifically disclosed, along with each subrange between such values. The upper and lower limits of any range can independently be included in or excluded from the range, and each range where either, neither or both limits are included is also encompassed within the invention. Where a value is explicitly recited, it is to be understood that values which are about the same quantity or amount as the recited value are also within the scope of the invention. Where a combination is disclosed, each subcombination of the elements of that combination is also specifically disclosed and is within the scope of the invention. Conversely, where different elements or groups of elements are individually disclosed, combinations thereof are also disclosed. Where any element of an invention is disclosed as having a plurality of alternatives, examples of that invention in which each alternative is excluded singly or in any combination with the other alternatives are also hereby disclosed; more than one element of an invention can have such exclusions, and all combinations of elements having such exclusions are hereby disclosed.

[0789] Nucleotides are referred to by their commonly accepted single-letter codes.

[0790] Unless otherwise indicated, nucleic acids are written left to right in 5′ to 3′ orientation. Nucleobases are referred to herein by their commonly known one-letter symbols recommended by the IUPAC-IUB Biochemical Nomenclature Commission.

[0791] Accordingly, A represents adenine, C represents cytosine, G represents guanine, T represents thymine, U represents uracil.

[0792] Amino acids are referred to herein by either their commonly known three letter symbols or by the one-letter symbols recommended by the IUPAC-IUB Biochemical Nomenclature Commission. Unless otherwise indicated, amino acid sequences are written left to right in amino to carboxy orientation.

[0793] About: The term “about” as used in connection with a numerical value throughout the specification and the claims denotes an interval of accuracy, familiar and acceptable to a person skilled in the art, such interval of accuracy is ±10%.

[0794] Where ranges are given, endpoints are included. Furthermore, unless otherwise indicated or otherwise evident from the context and understanding of one of ordinary skill in the art, values that are expressed as ranges can assume any specific value or subrange within the stated ranges in different embodiments of the invention, to the tenth of the unit of the lower limit of the range, unless the context clearly dictates otherwise.

[0795] Administered in combination: As used herein, the term “administered in combination” or “combined administration” means that two or more agents are administered to a subject at the same time or within an interval such that there can be an overlap of an effect of each agent on the patient. In some embodiments, they are administered within about 60, 30, 15, 10, 5, or 1 minute of one another. In some embodiments, the administrations of the agents are spaced sufficiently closely together such that a combinatorial (e.g., a synergistic) effect is achieved.

[0796] Amino acid substitution: The term “amino acid substitution” refers to replacing an amino acid residue present in a parent or reference sequence (e.g., a wild type wound healing polypeptide sequence) with another amino acid residue. An amino acid can be substituted in a parent or reference sequence (e.g., a wild type wound healing polypeptide sequence), for example, via chemical peptide synthesis or through recombinant methods known in the art. Accordingly, a reference to a “substitution at position X” refers to the substitution of an amino acid present at position X with an alternative amino acid residue. In some aspects, substitution patterns can be described according to the schema AnY, wherein A is the single letter code corresponding to the amino acid naturally or originally present at position n, and Y is the substituting amino acid residue. In other aspects, substitution patterns can be described according to the schema An(YZ), wherein A is the single letter code corresponding to the amino acid residue substituting the amino acid naturally or originally present at position X, and Y and Z are alternative substituting amino acid residue.

[0797] In the context of the present disclosure, substitutions (even when they referred to as amino acid substitution) are conducted at the nucleic acid level, i.e., substituting an amino acid residue with an alternative amino acid residue is conducted by substituting the codon encoding the first amino acid with a codon encoding the second amino acid.

[0798] Animal: As used herein, the term “animal” refers to any member of the animal kingdom. In some embodiments, “animal” refers to humans at any stage of development. In some embodiments, “animal” refers to non-human animals at any stage of development. In certain embodiments, the non-human animal is a mammal (e.g., a rodent, a mouse, a rat, a rabbit, a monkey, a dog, a cat, a sheep, cattle, a primate, or a pig). In some embodiments, animals include, but are not limited to, mammals, birds, reptiles, amphibians, fish, and worms. In some embodiments, the animal is a transgenic animal, genetically-engineered animal, or a clone.

[0799] Approximately: As used herein, the term “approximately,” as applied to one or more values of interest, refers to a value that is similar to a stated reference value. In certain embodiments, the term “approximately” refers to a range of values that fall within 25%, 20%, 19%, 18%, 17%, 16%, 15%, 14%, 13%, 12%, 11%, 10%, 9%, 8%, 7%, 6%, 5%, 4%, 3%, 2%, 1%, or less in either direction (greater than or less than) of the stated reference value unless otherwise stated or otherwise evident from the context (except where such number would exceed 100% of a possible value).

[0800] Associated with: As used herein with respect to a disease, the term “associated with” means that the symptom, measurement, characteristic, or status in question is linked to the diagnosis, development, presence, or progression of that disease. As association can, but need not, be causatively linked to the disease. For example, symptoms, sequelae, or any effects causing a decrease in the quality of life of a wounded patient are considered associated with wound healing (e.g., impaired wound healing) and in some embodiments of the present invention can be treated, ameliorated, or prevented by intradermally (e.g., using microneedles) or topically administering the polynucleotides of the present invention to a subject in need thereof.

[0801] When used with respect to two or more moieties, the terms “associated with,” “conjugated,” “linked,” “attached,” and “tethered,” when used with respect to two or more moieties, means that the moieties are physically associated or connected with one another, either directly or via one or more additional moieties that serves as a linking agent, to form a structure that is sufficiently stable so that the moieties remain physically associated under the conditions in which the structure is used, e.g., physiological conditions. An “association” need not be strictly through direct covalent chemical bonding. It can also suggest ionic or hydrogen bonding or a hybridization based connectivity sufficiently stable such that the “associated” entities remain physically associated.

[0802] Bifunctional: As used herein, the term “bifunctional” refers to any substance, molecule or moiety that is capable of or maintains at least two functions. The functions can affect the same outcome or a different outcome. The structure that produces the function can be the same or different. For example, bifunctional modified RNAs of the present invention can encode a wound healing peptide (a first function) while those nucleosides that comprise the encoding RNA are, in and of themselves, capable of extending the half-life of the RNA (second function). In this example, delivery of the bifunctional modified RNA to a subject suffering from a protein deficiency would produce not only a peptide or protein molecule that can ameliorate or treat a disease or conditions, but would also maintain a population modified RNA present in the subject for a prolonged period of time. In other aspects, a bifunctional modified mRNA can be a chimeric or quimeric molecule comprising, for example, an RNA encoding a wound healing peptide (a first function) and a second protein either fused to first protein or co-expressed with the first protein.

[0803] Biocompatible: As used herein, the term “biocompatible” means compatible with living cells, tissues, organs or systems posing little to no risk of injury, toxicity or rejection by the immune system.

[0804] Biodegradable: As used herein, the term “biodegradable” means capable of being broken down into innocuous products by the action of living things.

[0805] Biologically active: As used herein, the phrase “biologically active” refers to a characteristic of any substance that has activity in a biological system and/or organism. For instance, a substance that, when administered to an organism, has a biological effect on that organism, is considered to be biologically active. In particular embodiments, a polynucleotide of the present invention can be considered biologically active if even a portion of the polynucleotide is biologically active or mimics an activity considered biologically relevant.

[0806] Chimera: As used herein, “chimera” is an entity having two or more incongruous or heterogeneous parts or regions. For example, a chimeric molecule can comprise a first part comprising a wound healing polypeptide, and a second part (e.g., genetically fused to the first part) comprising a second therapeutic protein (e.g., a protein with a distinct enzymatic activity, an antigen binding moiety, or a moiety capable of extending the plasma half life of the wound healing polypeptide, for example, an Fc region of an antibody).

[0807] Sequence Optimization: The term “sequence optimization” refers to a process or series of processes by which nucleobases in a reference nucleic acid sequence are replaced with alternative nucleobases, resulting in a nucleic acid sequence with improved properties, e.g., improved protein expression or decreased immunogenicity.

[0808] In general, the goal in sequence optimization is to produce a synonymous nucleotide sequence than encodes the same polypeptide sequence encoded by the reference nucleotide sequence. Thus, there are no amino acid substitutions (as a result of codon optimization) in the polypeptide encoded by the codon optimized nucleotide sequence with respect to the polypeptide encoded by the reference nucleotide sequence.

[0809] Codon substitution: The terms “codon substitution” or “codon replacement” in the context of sequence optimization refer to replacing a codon present in a reference nucleic acid sequence with another codon. A codon can be substituted in a reference nucleic acid sequence, for example, via chemical peptide synthesis or through recombinant methods known in the art. Accordingly, references to a “substitution” or “replacement” at a certain location in a nucleic acid sequence (e.g., an mRNA) or within a certain region or subsequence of a nucleic acid sequence (e.g., an mRNA) refer to the substitution of a codon at such location or region with an alternative codon.

[0810] As used herein, the terms “coding region” and “region encoding” and grammatical variants thereof, refer to an Open Reading Frame (ORF) in a polynucleotide that upon expression yields a polypeptide or protein.

[0811] Compound: As used herein, the term “compound,” is meant to include all stereoisomers and isotopes of the structure depicted. As used herein, the term “stereoisomer” means any geometric isomer (e.g., cis- and trans-isomer), enantiomer, or diastereomer of a compound. The present disclosure encompasses any and all stereoisomers of the compounds described herein, including stereomerically pure forms (e.g., geometrically pure, enantiomerically pure, or diastereomerically pure) and enantiomeric and stereoisomeric mixtures, e.g., racemates. Enantiomeric and stereometric mixtures of compounds and means of resolving them into their component enantiomers or stereoisomers are well-known. “Isotopes” refers to atoms having the same atomic number but different mass numbers resulting from a different number of neutrons in the nuclei. For example, isotopes of hydrogen include tritium and deuterium. Further, a compound, salt, or complex of the present disclosure can be prepared in combination with solvent or water molecules to form solvates and hydrates by routine methods.

[0812] Contacting: As used herein, the term “contacting” means establishing a physical connection between two or more entities. For example, contacting a mammalian cell with a nanoparticle composition means that the mammalian cell and a nanoparticle are made to share a physical connection. Methods of contacting cells with external entities both in vivo and ex vivo are well known in the biological arts. For example, contacting a nanoparticle composition and a mammalian cell disposed within a mammal can be performed by varied routes of administration (e.g., intravenous, intramuscular, intradermal (e.g., using microneedles), and subcutaneous) and can involve varied amounts of nanoparticle compositions. Moreover, more than one mammalian cell can be contacted by a nanoparticle composition.

[0813] Conservative amino acid substitution: A “conservative amino acid substitution” is one in which the amino acid residue in a protein sequence is replaced with an amino acid residue having a similar side chain. Families of amino acid residues having similar side chains have been defined in the art, including basic side chains (e.g., lysine, arginine, or histidine), acidic side chains (e.g., aspartic acid or glutamic acid), uncharged polar side chains (e.g., glycine, asparagine, glutamine, serine, threonine, tyrosine, or cysteine), nonpolar side chains (e.g., alanine, valine, leucine, isoleucine, proline, phenylalanine, methionine, or tryptophan), beta-branched side chains (e.g., threonine, valine, isoleucine) and aromatic side chains (e.g., tyrosine, phenylalanine, tryptophan, or histidine). Thus, if an amino acid in a polypeptide is replaced with another amino acid from the same side chain family, the amino acid substitution is considered to be conservative. In another aspect, a string of amino acids can be conservatively replaced with a structurally similar string that differs in order and/or composition of side chain family members.

[0814] Non-conservative amino acid substitution: Non-conservative amino acid substitutions include those in which (i) a residue having an electropositive side chain (e.g., Arg, His or Lys) is substituted for, or by, an electronegative residue (e.g., Glu or Asp), (ii) a hydrophilic residue (e.g., Ser or Thr) is substituted for, or by, a hydrophobic residue (e.g., Ala, Leu, Ile, Phe or Val), (iii) a cysteine or proline is substituted for, or by, any other residue, or (iv) a residue having a bulky hydrophobic or aromatic side chain (e.g., Val, His, Ile or Trp) is substituted for, or by, one having a smaller side chain (e.g., Ala or Ser) or no side chain (e.g., Gly).

[0815] Other amino acid substitutions can be readily identified by workers of ordinary skill. For example, for the amino acid alanine, a substitution can be taken from any one of D-alanine, glycine, beta-alanine, L-cysteine and D-cysteine. For lysine, a replacement can be any one of D-lysine, arginine, D-arginine, homo-arginine, methionine, D-methionine, ornithine, or D-ornithine. Generally, substitutions in functionally important regions that can be expected to induce changes in the properties of isolated polypeptides are those in which (i) a polar residue, e.g., serine or threonine, is substituted for (or by) a hydrophobic residue, e.g., leucine, isoleucine, phenylalanine, or alanine; (ii) a cysteine residue is substituted for (or by) any other residue; (iii) a residue having an electropositive side chain, e.g., lysine, arginine or histidine, is substituted for (or by) a residue having an electronegative side chain, e.g., glutamic acid or aspartic acid; or (iv) a residue having a bulky side chain, e.g., phenylalanine, is substituted for (or by) one not having such a side chain, e.g., glycine. The likelihood that one of the foregoing non-conservative substitutions can alter functional properties of the protein is also correlated to the position of the substitution with respect to functionally important regions of the protein: some non-conservative substitutions can accordingly have little or no effect on biological properties.

[0816] Conserved: As used herein, the term “conserved” refers to nucleotides or amino acid residues of a polynucleotide sequence or polypeptide sequence, respectively, that are those that occur unaltered in the same position of two or more sequences being compared. Nucleotides or amino acids that are relatively conserved are those that are conserved amongst more related sequences than nucleotides or amino acids appearing elsewhere in the sequences.

[0817] In some embodiments, two or more sequences are said to be “completely conserved” if they are 100% identical to one another. In some embodiments, two or more sequences are said to be “highly conserved” if they are at least 70% identical, at least 80% identical, at least 90% identical, or at least 95% identical to one another. In some embodiments, two or more sequences are said to be “highly conserved” if they are about 70% identical, about 80% identical, about 90% identical, about 95%, about 98%, or about 99% identical to one another. In some embodiments, two or more sequences are said to be “conserved” if they are at least 30% identical, at least 40% identical, at least 50% identical, at least 60% identical, at least 70% identical, at least 80% identical, at least 90% identical, or at least 95% identical to one another. In some embodiments, two or more sequences are said to be “conserved” if they are about 30% identical, about 40% identical, about 50% identical, about 60% identical, about 70% identical, about 80% identical, about 90% identical, about 95% identical, about 98% identical, or about 99% identical to one another. Conservation of sequence can apply to the entire length of an polynucleotide or polypeptide or can apply to a portion, region or feature thereof.

[0818] Controlled Release: As used herein, the term “controlled release” refers to a pharmaceutical composition or compound release profile that conforms to a particular pattern of release to effect a therapeutic outcome.

[0819] Cyclic or Cyclized: As used herein, the term “cyclic” refers to the presence of a continuous loop. Cyclic molecules need not be circular, only joined to form an unbroken chain of subunits. Cyclic molecules such as the engineered RNA or mRNA of the present invention can be single units or multimers or comprise one or more components of a complex or higher order structure.

[0820] Cytotoxic: As used herein, “cytotoxic” refers to killing or causing injurious, toxic, or deadly effect on a cell (e.g., a mammalian cell (e.g., a human cell)), bacterium, virus, fungus, protozoan, parasite, prion, or a combination thereof.

[0821] Delivering: As used herein, the term “delivering” means providing an entity to a destination. For example, delivering a polynucleotide to a subject can involve intradermally (e.g., using microneedles) or topically administering a nanoparticle composition including the polynucleotide to the subject. Administration of a nanoparticle composition to a mammal or mammalian cell can involve contacting one or more cells with the nanoparticle composition.

[0822] Delivery Agent: As used herein, “delivery agent” refers to any substance that facilitates, at least in part, the in vivo, in vitro, or ex vivo delivery of a polynucleotide to targeted cells.

[0823] Destabilized: As used herein, the term “destable,” “destabilize,” or “destabilizing region” means a region or molecule that is less stable than a starting, wild-type or native form of the same region or molecule.

[0824] Diastereomer: As used herein, the term “diastereomer,” means stereoisomers that are not mirror images of one another and are non-superimposable on one another.

[0825] Digest: As used herein, the term “digest” means to break apart into smaller pieces or components. When referring to polypeptides or proteins, digestion results in the production of peptides.

[0826] Distal: As used herein, the term “distal” means situated away from the center or away from a point or region of interest.

[0827] Domain: As used herein, when referring to polypeptides, the term “domain” refers to a motif of a polypeptide having one or more identifiable structural or functional characteristics or properties (e.g., binding capacity, serving as a site for protein-protein interactions).

[0828] Dosing regimen: As used herein, a “dosing regimen” or a “dosing regimen” is a schedule of administration or physician determined regimen of treatment, prophylaxis, or palliative care.

[0829] Effective Amount: As used herein, the term “effective amount” of an agent is that amount sufficient to effect beneficial or desired results, for example, clinical results, and, as such, an “effective amount” depends upon the context in which it is being applied. For example, in the context of intradermally (e.g., using microneedles) or topically administering an agent that treats a protein deficiency (e.g., a wound healing polypeptide deficiency), an effective amount of an agent is, for example, an amount of mRNA expressing sufficient wound healing polypeptide to ameliorate, reduce, eliminate, or prevent the symptoms associated with the wound healing polypeptide deficiency, as compared to the severity of the symptom observed without administration of the agent. The term “effective amount” can be used interchangeably with “effective dose,” “therapeutically effective amount,” or “therapeutically effective dose.”

[0830] Enantiomer: As used herein, the term “enantiomer” means each individual optically active form of a compound of the invention, having an optical purity or enantiomeric excess (as determined by methods standard in the art) of at least 80% (i.e., at least 90% of one enantiomer and at most 10% of the other enantiomer), at least 90%, or at least 98%.

[0831] Encapsulate: As used herein, the term “encapsulate” means to enclose, surround or encase.

[0832] Encapsulation Efficiency: As used herein, “encapsulation efficiency” refers to the amount of a polynucleotide that becomes part of a nanoparticle composition, relative to the initial total amount of polynucleotide used in the preparation of a nanoparticle composition. For example, if 97 mg of polynucleotide are encapsulated in a nanoparticle composition out of a total 100 mg of polynucleotide initially provided to the composition, the encapsulation efficiency can be given as 97%. As used herein, “encapsulation” can refer to complete, substantial, or partial enclosure, confinement, surrounding, or encasement.

[0833] Encoded protein cleavage signal: As used herein, “encoded protein cleavage signal” refers to the nucleotide sequence that encodes a protein cleavage signal.

[0834] Engineered: As used herein, embodiments of the invention are “engineered” when they are designed to have a feature or property, whether structural or chemical, that varies from a starting point, wild type or native molecule.

[0835] Enhanced Delivery: As used herein, the term “enhanced delivery” means delivery of more (e.g., at least 1.5 fold more, at least 2-fold more, at least 3-fold more, at least 4-fold more, at least 5-fold more, at least 6-fold more, at least 7-fold more, at least 8-fold more, at least 9-fold more, at least 10-fold more) of a polynucleotide by a nanoparticle to a target tissue of interest (e.g., mammalian liver) compared to the level of delivery of a polynucleotide by a control nanoparticle to a target tissue of interest (e.g., MC3, KC2, or DLinDMA). The level of delivery of a nanoparticle to a particular tissue can be measured by comparing the amount of protein produced in a tissue to the weight of said tissue, comparing the amount of polynucleotide in a tissue to the weight of said tissue, comparing the amount of protein produced in a tissue to the amount of total protein in said tissue, or comparing the amount of polynucleotide in a tissue to the amount of total polynucleotide in said tissue. It will be understood that the enhanced delivery of a nanoparticle to a target tissue need not be determined in a subject being treated, it can be determined in a surrogate such as an animal model (e.g., a rat model).

[0836] Exosome: As used herein, “exosome” is a vesicle secreted by mammalian cells or a complex involved in RNA degradation.

[0837] Expression: As used herein, “expression” of a nucleic acid sequence refers to one or more of the following events: (1) production of an mRNA template from a DNA sequence (e.g., by transcription); (2) processing of an mRNA transcript (e.g., by splicing, editing, 5′ cap formation, and/or 3′ end processing); (3) translation of an mRNA into a polypeptide or protein; and (4) post-translational modification of a polypeptide or protein.

[0838] Ex Vivo: As used herein, the term “ex vivo” refers to events that occur outside of an organism (e.g., animal, plant, or microbe or cell or tissue thereof). Ex vivo events can take place in an environment minimally altered from a natural (e.g., in vivo) environment.

[0839] Feature: As used herein, a “feature” refers to a characteristic, a property, or a distinctive element. When referring to polypeptides, “features” are defined as distinct amino acid sequence-based components of a molecule. Features of the polypeptides encoded by the polynucleotides of the present invention include surface manifestations, local conformational shape, folds, loops, half-loops, domains, half-domains, sites, termini or any combination thereof.

[0840] Formulation: As used herein, a “formulation” includes at least a polynucleotide and one or more of a carrier, an excipient, and a delivery agent.

[0841] Fragment: A “fragment,” as used herein, refers to a portion. For example, fragments of proteins can comprise polypeptides obtained by digesting full-length protein isolated from cultured cells. In some embodiments, a fragment is a subsequences of a full length protein (e.g., a wound healing polypeptide) wherein N-terminal, and/or C-terminal, and/or internal subsequences have been deleted. In some preferred aspects of the present invention, the fragments of a protein of the present invention are functional fragments.

[0842] Functional: As used herein, a “functional” biological molecule is a biological molecule in a form in which it exhibits a property and/or activity by which it is characterized. Thus, a functional fragment of a polynucleotide of the present invention is a polynucleotide capable of expressing a functional fragment of a wound healing polypeptide. As used herein, a functional fragment of a wound healing polypeptide refers to a fragment of the wild type wound healing polypeptide (i.e., a fragment of any of its naturally occurring isoforms), or a mutant or variant thereof, wherein the fragment retains a least about 10%, at least about 15%, at least about 20%, at least about 25%, at least about 30%, at least about 35%, at least about 40%, at least about 45%, at least about 50%, at least about 55%, at least about 60%, at least about 65%, at least about 70%, at least about 75%, at least about 80%, at least about 85%, at least about 90%, or at least about 95% of the biological activity of the corresponding full length protein.

[0843] Helper Lipid: As used herein, the term “helper lipid” refers to a compound or molecule that includes a lipidic moiety (for insertion into a lipid layer, e.g., lipid bilayer) and a polar moiety (for interaction with physiologic solution at the surface of the lipid layer). Typically the helper lipid is a phospholipid. A function of the helper lipid is to “complement” the amino lipid and increase the fusogenicity of the bilayer and/or to help facilitate endosomal escape, e.g., of nucleic acid delivered to cells. Helper lipids are also believed to be a key structural component to the surface of the LNP.

[0844] Homology: As used herein, the term “homology” refers to the overall relatedness between polymeric molecules, e.g. between nucleic acid molecules (e.g. DNA molecules and/or RNA molecules) and/or between polypeptide molecules. Generally, the term “homology” implies an evolutionary relationship between two molecules. Thus, two molecules that are homologous will have a common evolutionary ancestor. In the context of the present invention, the term homology encompasses both to identity and similarity.

[0845] In some embodiments, polymeric molecules are considered to be “homologous” to one another if at least 25%, 30%, 35%, 40%, 45%, 50%, 55%, 60%, 65%, 70%, 75%, 80%, 85%, 90%, 95%, or 99% of the monomers in the molecule are identical (exactly the same monomer) or are similar (conservative substitutions). The term “homologous” necessarily refers to a comparison between at least two sequences (polynucleotide or polypeptide sequences).

[0846] Identity: As used herein, the term “identity” refers to the overall monomer conservation between polymeric molecules, e.g., between polynucleotide molecules (e.g. DNA molecules and/or RNA molecules) and/or between polypeptide molecules. Calculation of the percent identity of two polynucleotide sequences, for example, can be performed by aligning the two sequences for optimal comparison purposes (e.g., gaps can be introduced in one or both of a first and a second nucleic acid sequences for optimal alignment and non-identical sequences can be disregarded for comparison purposes). In certain embodiments, the length of a sequence aligned for comparison purposes is at least 30%, at least 40%, at least 50%, at least 60%, at least 70%, at least 80%, at least 90%, at least 95%, or 100% of the length of the reference sequence. The nucleotides at corresponding nucleotide positions are then compared. When a position in the first sequence is occupied by the same nucleotide as the corresponding position in the second sequence, then the molecules are identical at that position. The percent identity between the two sequences is a function of the number of identical positions shared by the sequences, taking into account the number of gaps, and the length of each gap, which needs to be introduced for optimal alignment of the two sequences. The comparison of sequences and determination of percent identity between two sequences can be accomplished using a mathematical algorithm. When comparing DNA and RNA, thymine (T) and uracil (U) can be considered equivalent.

[0847] Suitable software programs are available from various sources, and for alignment of both protein and nucleotide sequences. One suitable program to determine percent sequence identity is bl2seq, part of the BLAST suite of program available from the U.S. government's National Center for Biotechnology Information BLAST web site (blast.ncbi.nlm.nih.gov). Bl2seq performs a comparison between two sequences using either the BLASTN or BLASTP algorithm. BLASTN is used to compare nucleic acid sequences, while BLASTP is used to compare amino acid sequences. Other suitable programs are, e.g., Needle, Stretcher, Water, or Matcher, part of the EMBOSS suite of bioinformatics programs and also available from the European Bioinformatics Institute (EBI) at www.ebi.ac.uk/Tools/psa.

[0848] Sequence alignments can be conducted using methods known in the art such as MAFFT, Clustal (ClustalW, Clustal X or Clustal Omega), MUSCLE, etc.

[0849] Different regions within a single polynucleotide or polypeptide target sequence that aligns with a polynucleotide or polypeptide reference sequence can each have their own percent sequence identity. It is noted that the percent sequence identity value is rounded to the nearest tenth. For example, 80.11, 80.12, 80.13, and 80.14 are rounded down to 80.1, while 80.15, 80.16, 80.17, 80.18, and 80.19 are rounded up to 80.2. It also is noted that the length value will always be an integer.

[0850] In certain aspects, the percentage identity “% ID” of a first amino acid sequence (or nucleic acid sequence) to a second amino acid sequence (or nucleic acid sequence) is calculated as % ID=100×(Y/Z), where Y is the number of amino acid residues (or nucleobases) scored as identical matches in the alignment of the first and second sequences (as aligned by visual inspection or a particular sequence alignment program) and Z is the total number of residues in the second sequence. If the length of a first sequence is longer than the second sequence, the percent identity of the first sequence to the second sequence will be higher than the percent identity of the second sequence to the first sequence.

[0851] One skilled in the art will appreciate that the generation of a sequence alignment for the calculation of a percent sequence identity is not limited to binary sequence-sequence comparisons exclusively driven by primary sequence data. It will also be appreciated that sequence alignments can be generated by integrating sequence data with data from heterogeneous sources such as structural data (e.g., crystallographic protein structures), functional data (e.g., location of mutations), or phylogenetic data. A suitable program that integrates heterogeneous data to generate a multiple sequence alignment is T-Coffee, available at www.tcoffee.org, and alternatively available, e.g., from the EBI. It will also be appreciated that the final alignment used to calculate percent sequence identity can be curated either automatically or manually.

[0852] Immune response: The term “immune response” refers to the action of, for example, lymphocytes, antigen presenting cells, phagocytic cells, granulocytes, and soluble macromolecules produced by the above cells or the liver (including antibodies, cytokines, and complement) that results in selective damage to, destruction of, or elimination from the human body of invading pathogens, cells or tissues infected with pathogens, cancerous cells, or, in cases of autoimmunity or pathological inflammation, normal human cells or tissues. In some cases, the administration of a nanoparticle comprising a lipid component and an encapsulated therapeutic agent can trigger an immune response, which can be caused by (i) the encapsulated therapeutic agent (e.g., an mRNA), (ii) the expression product of such encapsulated therapeutic agent (e.g., a polypeptide encoded by the mRNA), (iii) the lipid component of the nanoparticle, or (iv) a combination thereof.

[0853] Inflammatory response: “Inflammatory response” refers to immune responses involving specific and non-specific defense systems. A specific defense system reaction is a specific immune system reaction to an antigen. Examples of specific defense system reactions include antibody responses. A non-specific defense system reaction is an inflammatory response mediated by leukocytes generally incapable of immunological memory, e.g., macrophages, eosinophils and neutrophils. In some aspects, an immune response includes the secretion of inflammatory cytokines, resulting in elevated inflammatory cytokine levels.

[0854] Inflammatory cytokines: The term “inflammatory cytokine” refers to cytokines that are elevated in an inflammatory response. Examples of inflammatory cytokines include interleukin-6 (IL-6), CXCL1 (chemokine (C—X—C motif) ligand 1; also known as GROα, interferon-γ (IFNγ), tumor necrosis factor α (TNFα), interferon γ-induced protein 10 (IP-10), or granulocyte-colony stimulating factor (G-CSF). The term inflammatory cytokines includes also other cytokines associated with inflammatory responses known in the art, e.g., interleukin-1 (IL-1), interleukin-8 (IL-8), interleukin-12 (IL-12), interleukin-13 (Il-13), interferon α (IFN-α), etc.

[0855] In vitro: As used herein, the term “in vitro” refers to events that occur in an artificial environment, e.g., in a test tube or reaction vessel, in cell culture, in a Petri dish, etc., rather than within an organism (e.g., animal, plant, or microbe).

[0856] In vivo: As used herein, the term “in vivo” refers to events that occur within an organism (e.g., animal, plant, or microbe or cell or tissue thereof).

[0857] Insertional and deletional variants: “Insertional variants” when referring to polypeptides are those with one or more amino acids inserted immediately adjacent to an amino acid at a particular position in a native or starting sequence. “Immediately adjacent” to an amino acid means connected to either the alpha-carboxy or alpha-amino functional group of the amino acid. “Deletional variants” when referring to polypeptides are those with one or more amino acids in the native or starting amino acid sequence removed. Ordinarily, deletional variants will have one or more amino acids deleted in a particular region of the molecule.

[0858] Intact: As used herein, in the context of a polypeptide, the term “intact” means retaining an amino acid corresponding to the wild type protein, e.g., not mutating or substituting the wild type amino acid. Conversely, in the context of a nucleic acid, the term “intact” means retaining a nucleobase corresponding to the wild type nucleic acid, e.g., not mutating or substituting the wild type nucleobase.

[0859] Ionizable amino lipid: The term “ionizable amino lipid” includes those lipids having one, two, three, or more fatty acid or fatty alkyl chains and a pH-titratable amino head group (e.g., an alkylamino or dialkylamino head group). An ionizable amino lipid is typically protonated (i.e., positively charged) at a pH below the pKa of the amino head group and is substantially not charged at a pH above the pKa. Such ionizable amino lipids include, but are not limited to DLin-MC3-DMA (MC3) and (13Z,165Z)—N,N-dimethyl-3-nonydocosa-13-16-dien-1-amine (L608).

[0860] Isolated: As used herein, the term “isolated” refers to a substance or entity that has been separated from at least some of the components with which it was associated (whether in nature or in an experimental setting). Isolated substances (e.g., polynucleotides or polypeptides) can have varying levels of purity in reference to the substances from which they have been isolated. Isolated substances and/or entities can be separated from at least about 10%, about 20%, about 30%, about 40%, about 50%, about 60%, about 70%, about 80%, about 90%, or more of the other components with which they were initially associated. In some embodiments, isolated substances are more than about 80%, about 85%, about 90%, about 91%, about 92%, about 93%, about 94%, about 95%, about 96%, about 97%, about 98%, about 99%, or more than about 99% pure. As used herein, a substance is “pure” if it is substantially free of other components.

[0861] Substantially isolated: By “substantially isolated” is meant that the compound is substantially separated from the environment in which it was formed or detected. Partial separation can include, for example, a composition enriched in the compound of the present disclosure. Substantial separation can include compositions containing at least about 50%, at least about 60%, at least about 70%, at least about 80%, at least about 90%, at least about 95%, at least about 97%, or at least about 99% by weight of the compound of the present disclosure, or salt thereof.

[0862] A polynucleotide, vector, polypeptide, cell, or any composition disclosed herein which is “isolated” is a polynucleotide, vector, polypeptide, cell, or composition which is in a form not found in nature. Isolated polynucleotides, vectors, polypeptides, or compositions include those which have been purified to a degree that they are no longer in a form in which they are found in nature. In some aspects, a polynucleotide, vector, polypeptide, or composition which is isolated is substantially pure.

[0863] Isomer: As used herein, the term “isomer” means any tautomer, stereoisomer, enantiomer, or diastereomer of any compound of the invention. It is recognized that the compounds of the invention can have one or more chiral centers and/or double bonds and, therefore, exist as stereoisomers, such as double-bond isomers (i.e., geometric E/Z isomers) or diastereomers (e.g., enantiomers (i.e., (+) or (−)) or cis/trans isomers). According to the invention, the chemical structures depicted herein, and therefore the compounds of the invention, encompass all of the corresponding stereoisomers, that is, both the stereomerically pure form (e.g., geometrically pure, enantiomerically pure, or diastereomerically pure) and enantiomeric and stereoisomeric mixtures, e.g., racemates. Enantiomeric and stereoisomeric mixtures of compounds of the invention can typically be resolved into their component enantiomers or stereoisomers by well-known methods, such as chiral-phase gas chromatography, chiral-phase high performance liquid chromatography, crystallizing the compound as a chiral salt complex, or crystallizing the compound in a chiral solvent. Enantiomers and stereoisomers can also be obtained from stereomerically or enantiomerically pure intermediates, reagents, and catalysts by well-known asymmetric synthetic methods.

[0864] Linker: As used herein, a “linker” refers to a group of atoms, e.g., 10-1,000 atoms, and can be comprised of the atoms or groups such as, but not limited to, carbon, amino, alkylamino, oxygen, sulfur, sulfoxide, sulfonyl, carbonyl, and imine. The linker can be attached to a modified nucleoside or nucleotide on the nucleobase or sugar moiety at a first end, and to a payload, e.g., a detectable or therapeutic agent, at a second end. The linker can be of sufficient length as to not interfere with incorporation into a nucleic acid sequence. The linker can be used for any useful purpose, such as to form polynucleotide multimers (e.g., through linkage of two or more chimeric polynucleotides molecules or IVT polynucleotides) or polynucleotides conjugates, as well as to administer a payload, as described herein. Examples of chemical groups that can be incorporated into the linker include, but are not limited to, alkyl, alkenyl, alkynyl, amido, amino, ether, thioether, ester, alkylene, heteroalkylene, aryl, or heterocyclyl, each of which can be optionally substituted, as described herein. Examples of linkers include, but are not limited to, unsaturated alkanes, polyethylene glycols (e.g., ethylene or propylene glycol monomeric units, e.g., diethylene glycol, dipropylene glycol, triethylene glycol, tripropylene glycol, tetraethylene glycol, or tetraethylene glycol), and dextran polymers and derivatives thereof, Other examples include, but are not limited to, cleavable moieties within the linker, such as, for example, a disulfide bond (—S—S—) or an azo bond (—N═N—), which can be cleaved using a reducing agent or photolysis. Non-limiting examples of a selectively cleavable bond include an amido bond can be cleaved for example by the use of tris(2-carboxyethyl)phosphine (TCEP), or other reducing agents, and/or photolysis, as well as an ester bond can be cleaved for example by acidic or basic hydrolysis.

[0865] Methods of Administration: As used herein, “methods of administration” can include intradermal (e.g., using microneedles), topical, subcutaneous, or other methods of delivering a composition to a subject. A method of administration can be selected to target delivery (e.g., to specifically deliver) to a specific region or system of a body.

[0866] Modified: As used herein “modified” refers to a changed state or structure of a molecule of the invention. Molecules can be modified in many ways including chemically, structurally, and functionally. In some embodiments, the mRNA molecules of the present invention are modified by the introduction of non-natural nucleosides and/or nucleotides, e.g., as it relates to the natural ribonucleotides A, U, G, and C. Noncanonical nucleotides such as the cap structures are not considered “modified” although they differ from the chemical structure of the A, C, G, U ribonucleotides.

[0867] Mucus: As used herein, “mucus” refers to the natural substance that is viscous and comprises mucin glycoproteins.

[0868] Nanoparticle Composition: As used herein, a “nanoparticle composition” is a composition comprising one or more lipids. Nanoparticle compositions are typically sized on the order of micrometers or smaller and can include a lipid bilayer. Nanoparticle compositions encompass lipid nanoparticles (LNPs), liposomes (e.g., lipid vesicles), and lipoplexes. For example, a nanoparticle composition can be a liposome having a lipid bilayer with a diameter of 500 nm or less.

[0869] Naturally occurring: As used herein, “naturally occurring” means existing in nature without artificial aid.

[0870] Non-human vertebrate: As used herein, a “non-human vertebrate” includes all vertebrates except Homo sapiens, including wild and domesticated species. Examples of non-human vertebrates include, but are not limited to, mammals, such as alpaca, banteng, bison, camel, cat, cattle, deer, dog, donkey, gayal, goat, guinea pig, horse, llama, mule, pig, rabbit, reindeer, sheep water buffalo, and yak.

[0871] Nucleic acid sequence: The terms “nucleic acid sequence,” “nucleotide sequence,” or “polynucleotide sequence” are used interchangeably and refer to a contiguous nucleic acid sequence. The sequence can be either single stranded or double stranded DNA or RNA, e.g., an mRNA.

[0872] The term “nucleic acid,” in its broadest sense, includes any compound and/or substance that comprises a polymer of nucleotides. These polymers are often referred to as polynucleotides. Exemplary nucleic acids or polynucleotides of the invention include, but are not limited to, ribonucleic acids (RNAs), deoxyribonucleic acids (DNAs), threose nucleic acids (TNAs), glycol nucleic acids (GNAs), peptide nucleic acids (PNAs), locked nucleic acids (LNAs, including LNA having a (3-D-ribo configuration, α-LNA having an α-L-ribo configuration (a diastereomer of LNA), 2′-amino-LNA having a 2′-amino functionalization, and 2′-amino-α-LNA having a 2′-amino functionalization), ethylene nucleic acids (ENA), cyclohexenyl nucleic acids (CeNA) or hybrids or combinations thereof.

[0873] The phrase “nucleotide sequence encoding” refers to the nucleic acid (e.g., an mRNA or DNA molecule) coding sequence which encodes a polypeptide. The coding sequence can further include initiation and termination signals operably linked to regulatory elements including a promoter and polyadenylation signal capable of directing expression in the cells of an individual or mammal to which the nucleic acid is administered. The coding sequence can further include sequences that encode signal peptides.

[0874] Off-target: As used herein, “off target” refers to any unintended effect on any one or more target, gene, or cellular transcript.

[0875] Open reading frame: As used herein, “open reading frame” or “ORF” refers to a sequence which does not contain a stop codon in a given reading frame.

[0876] Operably linked: As used herein, the phrase “operably linked” refers to a functional connection between two or more molecules, constructs, transcripts, entities, moieties or the like.

[0877] Optionally substituted: Herein a phrase of the form “optionally substituted X” (e.g., optionally substituted alkyl) is intended to be equivalent to “X, wherein X is optionally substituted” (e.g., “alkyl, wherein said alkyl is optionally substituted”). It is not intended to mean that the feature “X” (e.g., alkyl) per se is optional.

[0878] Part: As used herein, a “part” or “region” of a polynucleotide is defined as any portion of the polynucleotide that is less than the entire length of the polynucleotide.

[0879] Patient: As used herein, “patient” refers to a subject who can seek or be in need of treatment, requires treatment, is receiving treatment, will receive treatment, or a subject who is under care by a trained professional for a particular disease or condition. In some embodiments, the treatment is needed, required, or received to prevent or decrease the risk of developing acute disease, i.e., it is a prophylactic treatment.

[0880] Pharmaceutically acceptable: The phrase “pharmaceutically acceptable” is employed herein to refer to those compounds, materials, compositions, and/or dosage forms that are, within the scope of sound medical judgment, suitable for use in contact with the tissues of human beings and animals without excessive toxicity, irritation, allergic response, or other problem or complication, commensurate with a reasonable benefit/risk ratio.

[0881] Pharmaceutically acceptable excipients: The phrase “pharmaceutically acceptable excipient,” as used herein, refers any ingredient other than the compounds described herein (for example, a vehicle capable of suspending or dissolving the active compound) and having the properties of being substantially nontoxic and non-inflammatory in a patient. Excipients can include, for example: antiadherents, antioxidants, binders, coatings, compression aids, disintegrants, dyes (colors), emollients, emulsifiers, fillers (diluents), film formers or coatings, flavors, fragrances, glidants (flow enhancers), lubricants, preservatives, printing inks, sorbents, suspensing or dispersing agents, sweeteners, and waters of hydration. Exemplary excipients include, but are not limited to: butylated hydroxytoluene (BHT), calcium carbonate, calcium phosphate (dibasic), calcium stearate, croscarmellose, crosslinked polyvinyl pyrrolidone, citric acid, crospovidone, cysteine, ethylcellulose, gelatin, hydroxypropyl cellulose, hydroxypropyl methylcellulose, lactose, magnesium stearate, maltitol, mannitol, methionine, methylcellulose, methyl paraben, microcrystalline cellulose, polyethylene glycol, polyvinyl pyrrolidone, povidone, pregelatinized starch, propyl paraben, retinyl palmitate, shellac, silicon dioxide, sodium carboxymethyl cellulose, sodium citrate, sodium starch glycolate, sorbitol, starch (corn), stearic acid, sucrose, talc, titanium dioxide, vitamin A, vitamin E, vitamin C, and xylitol.

[0882] Pharmaceutically acceptable salts: The present disclosure also includes pharmaceutically acceptable salts of the compounds described herein. As used herein, “pharmaceutically acceptable salts” refers to derivatives of the disclosed compounds wherein the parent compound is modified by converting an existing acid or base moiety to its salt form (e.g., by reacting the free base group with a suitable organic acid). Examples of pharmaceutically acceptable salts include, but are not limited to, mineral or organic acid salts of basic residues such as amines; alkali or organic salts of acidic residues such as carboxylic acids; and the like. Representative acid addition salts include acetate, acetic acid, adipate, alginate, ascorbate, aspartate, benzenesulfonate, benzene sulfonic acid, benzoate, bisulfate, borate, butyrate, camphorate, camphorsulfonate, citrate, cyclopentanepropionate, digluconate, dodecylsulfate, ethanesulfonate, fumarate, glucoheptonate, glycerophosphate, hemisulfate, heptonate, hexanoate, hydrobromide, hydrochloride, hydroiodide, 2-hydroxy-ethanesulfonate, lactobionate, lactate, laurate, lauryl sulfate, malate, maleate, malonate, methanesulfonate, 2-naphthalenesulfonate, nicotinate, nitrate, oleate, oxalate, palmitate, pamoate, pectinate, persulfate, 3-phenylpropionate, phosphate, picrate, pivalate, propionate, stearate, succinate, sulfate, tartrate, thiocyanate, toluenesulfonate, undecanoate, valerate salts, and the like. Representative alkali or alkaline earth metal salts include sodium, lithium, potassium, calcium, magnesium, and the like, as well as nontoxic ammonium, quaternary ammonium, and amine cations, including, but not limited to ammonium, tetramethylammonium, tetraethylammonium, methylamine, dimethylamine, trimethylamine, triethylamine, ethylamine, and the like. The pharmaceutically acceptable salts of the present disclosure include the conventional non-toxic salts of the parent compound formed, for example, from non-toxic inorganic or organic acids. The pharmaceutically acceptable salts of the present disclosure can be synthesized from the parent compound that contains a basic or acidic moiety by conventional chemical methods. Generally, such salts can be prepared by reacting the free acid or base forms of these compounds with a stoichiometric amount of the appropriate base or acid in water or in an organic solvent, or in a mixture of the two; generally, nonaqueous media like ether, ethyl acetate, ethanol, isopropanol, or acetonitrile are used. Lists of suitable salts are found in Remington's Pharmaceutical Sciences, 17th ed., Mack Publishing Company, Easton, Pa., 1985, p. 1418, Pharmaceutical Salts: Properties, Selection, and Use, P. H. Stahl and C. G. Wermuth (eds.), Wiley-VCH, 2008, and Berge et al., Journal of Pharmaceutical Science, 66, 1-19 (1977), each of which is incorporated herein by reference in its entirety.

[0883] Pharmaceutically acceptable solvate: The term “pharmaceutically acceptable solvate,” as used herein, means a compound of the invention wherein molecules of a suitable solvent are incorporated in the crystal lattice. A suitable solvent is physiologically tolerable at the dosage administered. For example, solvates can be prepared by crystallization, recrystallization, or precipitation from a solution that includes organic solvents, water, or a mixture thereof. Examples of suitable solvents are ethanol, water (for example, mono-, di-, and tri-hydrates), N-methylpyrrolidinone (NMP), dimethyl sulfoxide (DMSO), N,N′-dimethylformamide (DMF), N,N′-dimethylacetamide (DMAC), 1,3-dimethyl-2-imidazolidinone (DMEU), 1,3-dimethyl-3,4,5,6-tetrahydro-2-(1H)-pyrimidinone (DMPU), acetonitrile (ACN), propylene glycol, ethyl acetate, benzyl alcohol, 2-pyrrolidone, benzyl benzoate, and the like. When water is the solvent, the solvate is referred to as a “hydrate.”

[0884] Pharmacokinetic: As used herein, “pharmacokinetic” refers to any one or more properties of a molecule or compound as it relates to the determination of the fate of substances administered to a living organism. Pharmacokinetics is divided into several areas including the extent and rate of absorption, distribution, metabolism and excretion. This is commonly referred to as ADME where: (A) Absorption is the process of a substance entering the blood circulation; (D) Distribution is the dispersion or dissemination of substances throughout the fluids and tissues of the body; (M) Metabolism (or Biotransformation) is the irreversible transformation of parent compounds into daughter metabolites; and (E) Excretion (or Elimination) refers to the elimination of the substances from the body. In rare cases, some drugs irreversibly accumulate in body tissue.

[0885] Physicochemical: As used herein, “physicochemical” means of or relating to a physical and/or chemical property.

[0886] Polynucleotide: The term “polynucleotide” as used herein refers to polymers of nucleotides of any length, including ribonucleotides, deoxyribonucleotides, analogs thereof, or mixtures thereof. This term refers to the primary structure of the molecule. Thus, the term includes triple-, double- and single-stranded deoxyribonucleic acid (“DNA”), as well as triple-, double- and single-stranded ribonucleic acid (“RNA”). It also includes modified, for example by alkylation, and/or by capping, and unmodified forms of the polynucleotide. More particularly, the term “polynucleotide” includes polydeoxyribonucleotides (containing 2-deoxy-D-ribose), polyribonucleotides (containing D-ribose), including tRNA, rRNA, hRNA, siRNA and mRNA, whether spliced or unspliced, any other type of polynucleotide which is an N- or C-glycoside of a purine or pyrimidine base, and other polymers containing normucleotidic backbones, for example, polyamide (e.g., peptide nucleic acids “PNAs”) and polymorpholino polymers, and other synthetic sequence-specific nucleic acid polymers providing that the polymers contain nucleobases in a configuration which allows for base pairing and base stacking, such as is found in DNA and RNA. In particular aspects, the polynucleotide comprises an mRNA. In other aspect, the mRNA is a synthetic mRNA. In some aspects, the synthetic mRNA comprises at least one unnatural nucleobase. In some aspects, all nucleobases of a certain class have been replaced with unnatural nucleobases (e.g., all uridines in a polynucleotide disclosed herein can be replaced with an unnatural nucleobase, e.g., 5-methoxyuridine). In some aspects, the polynucleotide (e.g., a synthetic RNA or a synthetic DNA) comprises only natural nucleobases, i.e., A (adenosine), G (guanosine), C (cytidine), and T (thymidine) in the case of a synthetic DNA, or A, C, G, and U (uridine) in the case of a synthetic RNA.

[0887] The skilled artisan will appreciate that the T bases in the codon maps disclosed herein are present in DNA, whereas the T bases would be replaced by U bases in corresponding RNAs. For example, a codon-nucleotide sequence disclosed herein in DNA form, e.g., a vector or an in-vitro translation (IVT) template, would have its T bases transcribed as U based in its corresponding transcribed mRNA. In this respect, both codon-optimized DNA sequences (comprising T) and their corresponding mRNA sequences (comprising U) are considered codon-optimized nucleotide sequence of the present invention. A skilled artisan would also understand that equivalent codon-maps can be generated by replaced one or more bases with non-natural bases. Thus, e.g., a TTC codon (DNA map) would correspond to a UUC codon (RNA map), which in turn would correspond to a ΨΨC codon (RNA map in which U has been replaced with pseudouridine).

[0888] Standard A-T and G-C base pairs form under conditions which allow the formation of hydrogen bonds between the N3-H and C₄-oxy of thymidine and the N1 and C6-NH2, respectively, of adenosine and between the C2-oxy, N3 and C4-NH2, of cytidine and the C2-NH2, N′—H and C6-oxy, respectively, of guanosine. Thus, for example, guanosine (2-amino-6-oxy-9-β-D-ribofuranosyl-purine) can be modified to form isoguanosine (2-oxy-6-amino-9β-D-ribofuranosyl-purine). Such modification results in a nucleoside base which will no longer effectively form a standard base pair with cytosine. However, modification of cytosine (1-β-D-ribofuranosyl-2-oxy-4-amino-pyrimidine) to form isocytosine (1-β-D-ribofuranosyl-2-amino-4-oxy-pyrimidine-) results in a modified nucleotide which will not effectively base pair with guanosine but will form a base pair with isoguanosine (U.S. Pat. No. 5,681,702 to Collins et al.). Isocytosine is available from Sigma Chemical Co. (St. Louis, Mo.); isocytidine can be prepared by the method described by Switzer et al. (1993) Biochemistry 32:10489-10496 and references cited therein; 2′-deoxy-5-methyl-isocytidine can be prepared by the method of Tor et al., 1993, J. Am. Chem. Soc. 115:4461-4467 and references cited therein; and isoguanine nucleotides can be prepared using the method described by Switzer et al., 1993, supra, and Mantsch et al., 1993, Biochem. 14:5593-5601, or by the method described in U.S. Pat. No. 5,780,610 to Collins et al. Other nonnatural base pairs can be synthesized by the method described in Piccirilli et al., 1990, Nature 343:33-37, for the synthesis of 2,6-diaminopyrimidine and its complement (1-methylpyrazolo-[4,3]pyrimidine-5,7-(4H,6H)-dione. Other such modified nucleotide units which form unique base pairs are known, such as those described in Leach et al. (1992) J. Am. Chem. Soc. 114:3675-3683 and Switzer et al., supra.

[0889] Polypeptide: The terms “polypeptide,” “peptide,” and “protein” are used interchangeably herein to refer to polymers of amino acids of any length. The polymer can comprise modified amino acids. The terms also encompass an amino acid polymer that has been modified naturally or by intervention; for example, disulfide bond formation, glycosylation, lipidation, acetylation, phosphorylation, or any other manipulation or modification, such as conjugation with a labeling component. Also included within the definition are, for example, polypeptides containing one or more analogs of an amino acid (including, for example, unnatural amino acids such as homocysteine, ornithine, p-acetylphenylalanine, D-amino acids, and creatine), as well as other modifications known in the art.

[0890] The term, as used herein, refers to proteins, polypeptides, and peptides of any size, structure, or function. Polypeptides include encoded polynucleotide products, naturally occurring polypeptides, synthetic polypeptides, homologs, orthologs, paralogs, fragments and other equivalents, variants, and analogs of the foregoing. A polypeptide can be a monomer or can be a multi-molecular complex such as a dimer, trimer or tetramer. They can also comprise single chain or multichain polypeptides. Most commonly disulfide linkages are found in multichain polypeptides. The term polypeptide can also apply to amino acid polymers in which one or more amino acid residues are an artificial chemical analogue of a corresponding naturally occurring amino acid. In some embodiments, a “peptide” can be less than or equal to 50 amino acids long, e.g., about 5, 10, 15, 20, 25, 30, 35, 40, 45, or 50 amino acids long.

[0891] Polypeptide variant: As used herein, the term “polypeptide variant” refers to molecules that differ in their amino acid sequence from a native or reference sequence. The amino acid sequence variants can possess substitutions, deletions, and/or insertions at certain positions within the amino acid sequence, as compared to a native or reference sequence. Ordinarily, variants will possess at least about 50% identity, at least about 60% identity, at least about 70% identity, at least about 80% identity, at least about 90% identity, at least about 95% identity, at least about 99% identity to a native or reference sequence. In some embodiments, they will be at least about 80%, or at least about 90% identical to a native or reference sequence.

[0892] Polypeptide per unit drug (PUD): As used herein, a PUD or product per unit drug, is defined as a subdivided portion of total daily dose, usually 1 mg, pg, kg, etc., of a product (such as a polypeptide) as measured in body fluid or tissue, usually defined in concentration such as pmol/mL, mmol/mL, etc. divided by the measure in the body fluid.

[0893] Preventing: As used herein, the term “preventing” refers to partially or completely delaying onset of an infection, disease, disorder and/or condition; partially or completely delaying onset of one or more symptoms, features, or clinical manifestations of a particular infection, disease, disorder, and/or condition; partially or completely delaying onset of one or more symptoms, features, or manifestations of a particular infection, disease, disorder, and/or condition; partially or completely delaying progression from an infection, a particular disease, disorder and/or condition; and/or decreasing the risk of developing pathology associated with the infection, the disease, disorder, and/or condition.

[0894] Proliferate: As used herein, the term “proliferate” means to grow, expand or increase or cause to grow, expand or increase rapidly. “Proliferative” means having the ability to proliferate. “Anti-proliferative” means having properties counter to or inapposite to proliferative properties.

[0895] Prophylactic: As used herein, “prophylactic” refers to a therapeutic or course of action used to prevent the spread of disease.

[0896] Prophylaxis: As used herein, a “prophylaxis” refers to a measure taken to maintain health and prevent the spread of disease. An “immune prophylaxis” refers to a measure to produce active or passive immunity to prevent the spread of disease.

[0897] Protein cleavage site: As used herein, “protein cleavage site” refers to a site where controlled cleavage of the amino acid chain can be accomplished by chemical, enzymatic or photochemical means.

[0898] Protein cleavage signal: As used herein “protein cleavage signal” refers to at least one amino acid that flags or marks a polypeptide for cleavage.

[0899] Protein of interest: As used herein, the terms “proteins of interest” or “desired proteins” include those provided herein and fragments, mutants, variants, and alterations thereof.

[0900] Proximal: As used herein, the term “proximal” means situated nearer to the center or to a point or region of interest.

[0901] Pseudouridine: As used herein, pseudouridine (ψ) refers to the C-glycoside isomer of the nucleoside uridine. A “pseudouridine analog” is any modification, variant, isoform or derivative of pseudouridine. For example, pseudouridine analogs include but are not limited to 1-carboxymethyl-pseudouridine, 1-propynyl-pseudouridine, 1-taurinomethyl-pseudouridine, 1-taurinomethyl-4-thio-pseudouridine, 1-methylpseudouridine (m¹ψ) (also known as N1-methyl-pseudouridine), 1-methyl-4-thio-pseudouridine (m¹s⁴ψ), 4-thio-1-methyl-pseudouridine, 3-methyl-pseudouridine (m³ψ), 2-thio-1-methyl-pseudouridine, 1-methyl-1-deaza-pseudouridine, 2-thio-1-methyl-1-deaza-pseudouridine, dihydropseudouridine, 2-thio-dihydropseudouridine, 2-methoxyuridine, 2-methoxy-4-thio-uridine, 4-methoxy-pseudouridine, 4-methoxy-2-thio-pseudouridine, 1-methyl-3-(3-amino-3-carboxypropyl)pseudouridine (acp³ψ), and 2′-O-methyl-pseudouridine (ψm).

[0902] Purified: As used herein, “purify,” “purified,” “purification” means to make substantially pure or clear from unwanted components, material defilement, admixture or imperfection.

[0903] Reference Nucleic Acid Sequence: The term “reference nucleic acid sequence” or “reference nucleic acid” or “reference nucleotide sequence” or “reference sequence” refers to a starting nucleic acid sequence (e.g., a RNA, e.g., an mRNA sequence) that can be sequence optimized. In some embodiments, the reference nucleic acid sequence is a wild type nucleic acid sequence, a fragment or a variant thereof. In some embodiments, the reference nucleic acid sequence is a previously sequence optimized nucleic acid sequence.

[0904] Salts: In some aspects, the pharmaceutical composition for delivery disclosed herein and comprises salts of some of their lipid constituents. The term “salt” includes any anionic and cationic complex. Non-limiting examples of anions include inorganic and organic anions, e.g., fluoride, chloride, bromide, iodide, oxalate (e.g., hemioxalate), phosphate, phosphonate, hydrogen phosphate, dihydrogen phosphate, oxide, carbonate, bicarbonate, nitrate, nitrite, nitride, bisulfite, sulfide, sulfite, bisulfate, sulfate, thiosulfate, hydrogen sulfate, borate, formate, acetate, benzoate, citrate, tartrate, lactate, acrylate, polyacrylate, fumarate, maleate, itaconate, glycolate, gluconate, malate, mandelate, tiglate, ascorbate, salicylate, polymethacrylate, perchlorate, chlorate, chlorite, hypochlorite, bromate, hypobromite, iodate, an alkylsulfonate, an arylsulfonate, arsenate, arsenite, chromate, dichromate, cyanide, cyanate, thiocyanate, hydroxide, peroxide, permanganate, and mixtures thereof.

[0905] Sample: As used herein, the term “sample” or “biological sample” refers to a subset of its tissues, cells or component parts (e.g., body fluids, including but not limited to blood, mucus, lymphatic fluid, synovial fluid, cerebrospinal fluid, saliva, amniotic fluid, amniotic cord blood, urine, vaginal fluid and semen). A sample further can include a homogenate, lysate or extract prepared from a whole organism or a subset of its tissues, cells or component parts, or a fraction or portion thereof, including but not limited to, for example, plasma, serum, spinal fluid, lymph fluid, the external sections of the skin, respiratory, intestinal, and genitourinary tracts, tears, saliva, milk, blood cells, tumors, organs. A sample further refers to a medium, such as a nutrient broth or gel, which can contain cellular components, such as proteins or nucleic acid molecule.

[0906] Signal Sequence: As used herein, the phrases “signal sequence,” “signal peptide,” and “transit peptide” are used interchangeably and refer to a sequence that can direct the transport or localization of a protein to a certain organelle, cell compartment, or extracellular export. The term encompasses both the signal sequence polypeptide and the nucleic acid sequence encoding the signal sequence. Thus, references to a signal sequence in the context of a nucleic acid refer in fact to the nucleic acid sequence encoding the signal sequence polypeptide.

[0907] Signal transduction pathway: A “signal transduction pathway” refers to the biochemical relationship between a variety of signal transduction molecules that play a role in the transmission of a signal from one portion of a cell to another portion of a cell. As used herein, the phrase “cell surface receptor” includes, for example, molecules and complexes of molecules capable of receiving a signal and the transmission of such a signal across the plasma membrane of a cell.

[0908] Similarity: As used herein, the term “similarity” refers to the overall relatedness between polymeric molecules, e.g. between polynucleotide molecules (e.g. DNA molecules and/or RNA molecules) and/or between polypeptide molecules. Calculation of percent similarity of polymeric molecules to one another can be performed in the same manner as a calculation of percent identity, except that calculation of percent similarity takes into account conservative substitutions as is understood in the art.

[0909] Single unit dose: As used herein, a “single unit dose” is a dose of any therapeutic administered in one dose/at one time/single route/single point of contact, i.e., single administration event.

[0910] Split dose: As used herein, a “split dose” is the division of single unit dose or total daily dose into two or more doses.

[0911] Specific delivery: As used herein, the term “specific delivery,” “specifically deliver,” or “specifically delivering” means delivery of more (e.g., at least 1.5 fold more, at least 2-fold more, at least 3-fold more, at least 4-fold more, at least 5-fold more, at least 6-fold more, at least 7-fold more, at least 8-fold more, at least 9-fold more, at least 10-fold more) of a polynucleotide by a nanoparticle to a target tissue of interest (e.g., mammalian liver) compared to an off-target tissue (e.g., mammalian spleen). The level of delivery of a nanoparticle to a particular tissue can be measured by comparing the amount of protein produced in a tissue to the weight of said tissue, comparing the amount of polynucleotide in a tissue to the weight of said tissue, comparing the amount of protein produced in a tissue to the amount of total protein in said tissue, or comparing the amount of polynucleotide in a tissue to the amount of total polynucleotide in said tissue. For example, for renovascular targeting, a polynucleotide is specifically provided to a mammalian kidney as compared to the liver and spleen if 1.5, 2-fold, 3-fold, 5-fold, 10-fold, 15 fold, or 20 fold more polynucleotide per 1 g of tissue is delivered to a kidney compared to that delivered to the liver or spleen following systemic administration of the polynucleotide. It will be understood that the ability of a nanoparticle to specifically deliver to a target tissue need not be determined in a subject being treated, it can be determined in a surrogate such as an animal model (e.g., a rat model).

[0912] Stable: As used herein “stable” refers to a compound that is sufficiently robust to survive isolation to a useful degree of purity from a reaction mixture, and in some cases capable of formulation into an efficacious therapeutic agent.

[0913] Stabilized: As used herein, the term “stabilize,” “stabilized,” “stabilized region” means to make or become stable.

[0914] Stereoisomer: As used herein, the term “stereoisomer” refers to all possible different isomeric as well as conformational forms that a compound can possess (e.g., a compound of any formula described herein), in particular all possible stereochemically and conformationally isomeric forms, all diastereomers, enantiomers and/or conformers of the basic molecular structure. Some compounds of the present invention can exist in different tautomeric forms, all of the latter being included within the scope of the present invention.

[0915] Subject: By “subject” or “individual” or “animal” or “patient” or “mammal,” is meant any subject, particularly a mammalian subject, for whom diagnosis, prognosis, or therapy is desired. Mammalian subjects include, but are not limited to, humans, domestic animals, farm animals, zoo animals, sport animals, pet animals such as dogs, cats, guinea pigs, rabbits, rats, mice, horses, cattle, cows; primates such as apes, monkeys, orangutans, and chimpanzees; canids such as dogs and wolves; felids such as cats, lions, and tigers; equids such as horses, donkeys, and zebras; bears, food animals such as cows, pigs, and sheep; ungulates such as deer and giraffes; rodents such as mice, rats, hamsters and guinea pigs; and so on. In certain embodiments, the mammal is a human subject. In other embodiments, a subject is a human patient. In a particular embodiment, a subject is a human patient in need of treatment.

[0916] Substantially: As used herein, the term “substantially” refers to the qualitative condition of exhibiting total or near-total extent or degree of a characteristic or property of interest. One of ordinary skill in the biological arts will understand that biological and chemical characteristics rarely, if ever, go to completion and/or proceed to completeness or achieve or avoid an absolute result. The term “substantially” is therefore used herein to capture the potential lack of completeness inherent in many biological and chemical characteristics.

[0917] Substantially equal: As used herein as it relates to time differences between doses, the term means plus/minus 2%.

[0918] Substantially simultaneous: As used herein and as it relates to plurality of doses, the term means within 2 seconds.

[0919] Suffering from: An individual who is “suffering from” a disease, disorder, and/or condition has been diagnosed with or displays one or more symptoms of the disease, disorder, and/or condition.

[0920] Susceptible to: An individual who is “susceptible to” a disease, disorder, and/or condition has not been diagnosed with and/or cannot exhibit symptoms of the disease, disorder, and/or condition but harbors a propensity to develop a disease or its symptoms. In some embodiments, an individual who is susceptible to a disease, disorder, and/or condition (for example, wound healing (e.g., impaired wound healing)) can be characterized by one or more of the following: (1) a genetic mutation associated with development of the disease, disorder, and/or condition; (2) a genetic polymorphism associated with development of the disease, disorder, and/or condition; (3) increased and/or decreased expression and/or activity of a protein and/or nucleic acid associated with the disease, disorder, and/or condition; (4) habits and/or lifestyles associated with development of the disease, disorder, and/or condition; (5) a family history of the disease, disorder, and/or condition; and (6) exposure to and/or infection with a microbe associated with development of the disease, disorder, and/or condition. In some embodiments, an individual who is susceptible to a disease, disorder, and/or condition will develop the disease, disorder, and/or condition. In some embodiments, an individual who is susceptible to a disease, disorder, and/or condition will not develop the disease, disorder, and/or condition.

[0921] Sustained release: As used herein, the term “sustained release” refers to a pharmaceutical composition or compound release profile that conforms to a release rate over a specific period of time.

[0922] Synthetic: The term “synthetic” means produced, prepared, and/or manufactured by the hand of man. Synthesis of polynucleotides or other molecules of the present invention can be chemical or enzymatic.

[0923] Targeted Cells: As used herein, “targeted cells” refers to any one or more cells of interest. The cells can be found in vitro, in vivo, in situ or in the tissue or organ of an organism. The organism can be an animal, for example a mammal, a human, a subject or a patient.

[0924] Target tissue: As used herein “target tissue” refers to any one or more tissue types of interest in which the delivery of a polynucleotide would result in a desired biological and/or pharmacological effect. Examples of target tissues of interest include specific tissues, organs, and systems or groups thereof. In particular applications, a target tissue can be a liver, a kidney, a lung, a spleen, or a vascular endothelium in vessels (e.g., intra-coronary or intra-femoral). An “off-target tissue” refers to any one or more tissue types in which the expression of the encoded protein does not result in a desired biological and/or pharmacological effect.

[0925] The presence of a therapeutic agent in an off-target issue can be the result of: (i) leakage of a polynucleotide from the administration site to peripheral tissue or distant off-target tissue via diffusion or through the bloodstream (e.g., a polynucleotide intended to express a polypeptide in a certain tissue would reach the off-target tissue and the polypeptide would be expressed in the off-target tissue); or (ii) leakage of an polypeptide after administration of a polynucleotide encoding such polypeptide to peripheral tissue or distant off-target tissue via diffusion or through the bloodstream (e.g., a polynucleotide would expressed a polypeptide in the target tissue, and the polypeptide would diffuse to peripheral tissue).

[0926] Targeting sequence: As used herein, the phrase “targeting sequence” refers to a sequence that can direct the transport or localization of a protein or polypeptide.

[0927] Terminus: As used herein the terms “termini” or “terminus,” when referring to polypeptides, refers to an extremity of a peptide or polypeptide. Such extremity is not limited only to the first or final site of the peptide or polypeptide but can include additional amino acids in the terminal regions. The polypeptide based molecules of the invention can be characterized as having both an N-terminus (terminated by an amino acid with a free amino group (NH2)) and a C-terminus (terminated by an amino acid with a free carboxyl group (COOH)). Proteins of the invention are in some cases made up of multiple polypeptide chains brought together by disulfide bonds or by non-covalent forces (multimers, oligomers). These sorts of proteins will have multiple N- and C-termini. Alternatively, the termini of the polypeptides can be modified such that they begin or end, as the case can be, with a non-polypeptide based moiety such as an organic conjugate.

[0928] Therapeutic Agent: The term “therapeutic agent” refers to an agent that, when administered to a subject, has a therapeutic, diagnostic, and/or prophylactic effect and/or elicits a desired biological and/or pharmacological effect. For example, in some embodiments, an mRNA encoding a wound healing polypeptide can be a therapeutic agent.

[0929] Therapeutically effective amount: As used herein, the term “therapeutically effective amount” means an amount of an agent to be delivered (e.g., nucleic acid, drug, therapeutic agent, diagnostic agent, prophylactic agent, etc.) that is sufficient, when administered to a subject suffering from or susceptible to an infection, disease, disorder, and/or condition, to treat, improve symptoms of, diagnose, prevent, and/or delay the onset of the infection, disease, disorder, and/or condition.

[0930] Therapeutically effective outcome: As used herein, the term “therapeutically effective outcome” means an outcome that is sufficient in a subject suffering from or susceptible to an infection, disease, disorder, and/or condition, to treat, improve symptoms of, diagnose, prevent, and/or delay the onset of the infection, disease, disorder, and/or condition.

[0931] Total daily dose: As used herein, a “total daily dose” is an amount given or prescribed in 24 hr. period. The total daily dose can be administered as a single unit dose or a split dose.

[0932] Transcription factor: As used herein, the term “transcription factor” refers to a DNA-binding protein that regulates transcription of DNA into RNA, for example, by activation or repression of transcription. Some transcription factors effect regulation of transcription alone, while others act in concert with other proteins. Some transcription factor can both activate and repress transcription under certain conditions. In general, transcription factors bind a specific target sequence or sequences highly similar to a specific consensus sequence in a regulatory region of a target gene. Transcription factors can regulate transcription of a target gene alone or in a complex with other molecules.

[0933] Transcription: As used herein, the term “transcription” refers to methods to produce mRNA (e.g., an mRNA sequence or template) from DNA (e.g., a DNA template or sequence)

[0934] Transfection: As used herein, “transfection” refers to the introduction of a polynucleotide (e.g., exogenous nucleic acids) into a cell wherein a polypeptide encoded by the polynucleotide is expressed (e.g., mRNA) or the polypeptide modulates a cellular function (e.g., siRNA, miRNA). As used herein, “expression” of a nucleic acid sequence refers to translation of a polynucleotide (e.g., an mRNA) into a polypeptide or protein and/or post-translational modification of a polypeptide or protein. Methods of transfection include, but are not limited to, chemical methods, physical treatments and cationic lipids or mixtures.

[0935] Treating, treatment, therapy: As used herein, the term “treating” or “treatment” or “therapy” refers to partially or completely alleviating, ameliorating, improving, relieving, delaying onset of, inhibiting progression of, reducing severity of, and/or reducing incidence of one or more symptoms or features of a disease or condition, e.g., wound healing (e.g., impaired wound healing). For example, “treating” wound healing can refer to diminishing symptoms associate with the condition, prolong the lifespan (increase the survival rate) of patients, reducing the severity of the condition, preventing or delaying the onset of the condition, etc. Treatment can be administered to a subject who does not exhibit signs of a disease, disorder, and/or condition and/or to a subject who exhibits only early signs of a disease, disorder, and/or condition for the purpose of decreasing the risk of developing pathology associated with the disease, disorder, and/or condition.

[0936] Unmodified: As used herein, “unmodified” refers to any substance, compound or molecule prior to being changed in some way. Unmodified can, but does not always, refer to the wild type or native form of a biomolecule. Molecules can undergo a series of modifications whereby each modified molecule can serve as the “unmodified” starting molecule for a subsequent modification.

[0937] Uracil: Uracil is one of the four nucleobases in the nucleic acid of RNA, and it is represented by the letter U. Uracil can be attached to a ribose ring, or more specifically, a ribofuranose via a β-N₁-glycosidic bond to yield the nucleoside uridine. The nucleoside uridine is also commonly abbreviated according to the one letter code of its nucleobase, i.e., U. Thus, in the context of the present disclosure, when a monomer in a polynucleotide sequence is U, such U is designated interchangeably as a “uracil” or a “uridine.”

[0938] Uridine Content: The terms “uridine content” or “uracil content” are interchangeable and refer to the amount of uracil or uridine present in a certain nucleic acid sequence. Uridine content or uracil content can be expressed as an absolute value (total number of uridine or uracil in the sequence) or relative (uridine or uracil percentage respect to the total number of nucleobases in the nucleic acid sequence).

[0939] Uridine-Modified Sequence: The terms “uridine-modified sequence” refers to a sequence optimized nucleic acid (e.g., a synthetic mRNA sequence) with a different overall or local uridine content (higher or lower uridine content) or with different uridine patterns (e.g., gradient distribution or clustering) with respect to the uridine content and/or uridine patterns of a candidate nucleic acid sequence. In the content of the present disclosure, the terms “uridine-modified sequence” and “uracil-modified sequence” are considered equivalent and interchangeable.

[0940] A “high uridine codon” is defined as a codon comprising two or three uridines, a “low uridine codon” is defined as a codon comprising one uridine, and a “no uridine codon” is a codon without any uridines. In some embodiments, a uridine-modified sequence comprises substitutions of high uridine codons with low uridine codons, substitutions of high uridine codons with no uridine codons, substitutions of low uridine codons with high uridine codons, substitutions of low uridine codons with no uridine codons, substitution of no uridine codons with low uridine codons, substitutions of no uridine codons with high uridine codons, and combinations thereof. In some embodiments, a high uridine codon can be replaced with another high uridine codon. In some embodiments, a low uridine codon can be replaced with another low uridine codon. In some embodiments, a no uridine codon can be replaced with another no uridine codon. A uridine-modified sequence can be uridine enriched or uridine rarefied.

[0941] Uridine Enriched: As used herein, the terms “uridine enriched” and grammatical variants refer to the increase in uridine content (expressed in absolute value or as a percentage value) in a sequence optimized nucleic acid (e.g., a synthetic mRNA sequence) with respect to the uridine content of the corresponding candidate nucleic acid sequence. Uridine enrichment can be implemented by substituting codons in the candidate nucleic acid sequence with synonymous codons containing less uridine nucleobases. Uridine enrichment can be global (i.e., relative to the entire length of a candidate nucleic acid sequence) or local (i.e., relative to a subsequence or region of a candidate nucleic acid sequence).

[0942] Uridine Rarefied: As used herein, the terms “uridine rarefied” and grammatical variants refer to a decrease in uridine content (expressed in absolute value or as a percentage value) in a sequence optimized nucleic acid (e.g., a synthetic mRNA sequence) with respect to the uridine content of the corresponding candidate nucleic acid sequence. Uridine rarefication can be implemented by substituting codons in the candidate nucleic acid sequence with synonymous codons containing less uridine nucleobases. Uridine rarefication can be global (i.e., relative to the entire length of a candidate nucleic acid sequence) or local (i.e., relative to a subsequence or region of a candidate nucleic acid sequence).

[0943] Variant: The term variant as used in present disclosure refers to both natural variants (e.g., polymorphisms, isoforms, etc.), and artificial variants in which at least one amino acid residue in a native or starting sequence (e.g., a wild type sequence) has been removed and a different amino acid inserted in its place at the same position. These variants can be described as “substitutional variants.” The substitutions can be single, where only one amino acid in the molecule has been substituted, or they can be multiple, where two or more amino acids have been substituted in the same molecule. If amino acids are inserted or deleted, the resulting variant would be an “insertional variant” or a “deletional variant” respectively.

[0944] Initiation Codon: As used herein, the term “initiation codon”, used interchangeably with the term “start codon”, refers to the first codon of an open reading frame that is translated by the ribosome and is comprised of a triplet of linked adenine-uracil-guanine nucleobases. The initiation codon is depicted by the first letter codes of adenine (A), uracil (U), and guanine (G) and is often written simply as “AUG”. Although natural mRNAs may use codons other than AUG as the initiation codon, which are referred to herein as “alternative initiation codons”, the initiation codons of polynucleotides described herein use the AUG codon. During the process of translation initiation, the sequence comprising the initiation codon is recognized via complementary base-pairing to the anticodon of an initiator tRNA (Met-tRNAᵢ^{Met}) bound by the ribosome. Open reading frames may contain more than one AUG initiation codon, which are referred to herein as “alternate initiation codons”.

[0945] The initiation codon plays a critical role in translation initiation. The initiation codon is the first codon of an open reading frame that is translated by the ribosome. Typically, the initiation codon comprises the nucleotide triplet AUG, however, in some instances translation initiation can occur at other codons comprised of distinct nucleotides. The initiation of translation in eukaryotes is a multistep biochemical process that involves numerous protein-protein, protein-RNA, and RNA-RNA interactions between messenger RNA molecules (mRNAs), the 40S ribosomal subunit, other components of the translation machinery (e.g., eukaryotic initiation factors; eIFs). The current model of mRNA translation initiation postulates that the pre-initiation complex (alternatively “43S pre-initiation complex”; abbreviated as “PIC”) translocates from the site of recruitment on the mRNA (typically the 5′ cap) to the initiation codon by scanning nucleotides in a 5′ to 3′ direction until the first AUG codon that resides within a specific translation-promotive nucleotide context (the Kozak sequence) is encountered (Kozak (1989) J Cell Biol 108:229-241). Scanning by the PIC ends upon complementary base-pairing between nucleotides comprising the anticodon of the initiator Met-tRNAᵢ^{Met} transfer RNA and nucleotides comprising the initiation codon of the mRNA. Productive base-pairing between the AUG codon and the Met-tRNAᵢ^{Met} anticodon elicits a series of structural and biochemical events that culminate in the joining of the large 60S ribosomal subunit to the PIC to form an active ribosome that is competent for translation elongation.

[0946] Kozak Sequence: The term “Kozak sequence” (also referred to as “Kozak consensus sequence”) refers to a translation initiation enhancer element to enhance expression of a gene or open reading frame, and which in eukaryotes, is located in the 5′ UTR. The Kozak consensus sequence was originally defined as the sequence GCCRCC (SEQ ID NO:41), where R=a purine, following an analysis of the effects of single mutations surrounding the initiation codon (AUG) on translation of the preproinsulin gene (Kozak (1986) Cell 44:283-292). Polynucleotides disclosed herein comprise a Kozak consensus sequence, or a derivative or modification thereof (Examples of translational enhancer compositions and methods of use thereof, see U.S. Pat. No. 5,807,707 to Andrews et al., incorporated herein by reference in its entirety; U.S. Pat. No. 5,723,332 to Chernajovsky, incorporated herein by reference in its entirety; U.S. Pat. No. 5,891,665 to Wilson, incorporated herein by reference in its entirety.)

[0947] Modified: As used herein “modified” or “modification” refers to a changed state or a change in composition or structure of a polynucleotide (e.g., mRNA). Polynucleotides may be modified in various ways including chemically, structurally, and/or functionally. For example, polynucleotides may be structurally modified by the incorporation of one or more RNA elements, wherein the RNA element comprises a sequence and/or an RNA secondary structure(s) that provides one or more functions (e.g., translational regulatory activity). Accordingly, polynucleotides of the disclosure may be comprised of one or more modifications (e.g., may include one or more chemical, structural, or functional modifications, including any combination thereof).

[0948] Nucleobase: As used herein, the term “nucleobase” (alternatively “nucleotide base” or “nitrogenous base”) refers to a purine or pyrimidine heterocyclic compound found in nucleic acids, including any derivatives or analogs of the naturally occurring purines and pyrimidines that confer improved properties (e.g., binding affinity, nuclease resistance, chemical stability) to a nucleic acid or a portion or segment thereof. Adenine, cytosine, guanine, thymine, and uracil are the nucleobases predominately found in natural nucleic acids. Other natural, non-natural, and/or synthetic nucleobases, as known in the art and/or described herein, can be incorporated into nucleic acids.

[0949] Nucleoside/Nucleotide: As used herein, the term “nucleoside” refers to a compound containing a sugar molecule (e.g., a ribose in RNA or a deoxyribose in DNA), or derivative or analog thereof, covalently linked to a nucleobase (e.g., a purine or pyrimidine), or a derivative or analog thereof (also referred to herein as “nucleobase”), but lacking an internucleoside linking group (e.g., a phosphate group). As used herein, the term “nucleotide” refers to a nucleoside covalently bonded to an internucleoside linking group (e.g., a phosphate group), or any derivative, analog, or modification thereof that confers improved chemical and/or functional properties (e.g., binding affinity, nuclease resistance, chemical stability) to a nucleic acid or a portion or segment thereof.

[0950] Nucleic acid: As used herein, the term “nucleic acid” is used in its broadest sense and encompasses any compound and/or substance that includes a polymer of nucleotides, or derivatives or analogs thereof. These polymers are often referred to as “polynucleotides”. Accordingly, as used herein the terms “nucleic acid” and “polynucleotide” are equivalent and are used interchangeably. Exemplary nucleic acids or polynucleotides of the disclosure include, but are not limited to, ribonucleic acids (RNAs), deoxyribonucleic acids (DNAs), DNA-RNA hybrids, RNAi-inducing agents, RNAi agents, siRNAs, shRNAs, mRNAs, modified mRNAs, miRNAs, antisense RNAs, ribozymes, catalytic DNA, RNAs that induce triple helix formation, threose nucleic acids (TNAs), glycol nucleic acids (GNAs), peptide nucleic acids (PNAs), locked nucleic acids (LNAs, including LNA having a β-D-ribo configuration, α-LNA having an α-L-ribo configuration (a diastereomer of LNA), 2′-amino-LNA having a 2′-amino functionalization, and 2′-amino-α-LNA having a 2′-amino functionalization) or hybrids thereof.

[0951] Nucleic Acid Structure: As used herein, the term “nucleic acid structure” (used interchangeably with “polynucleotide structure”) refers to the arrangement or organization of atoms, chemical constituents, elements, motifs, and/or sequence of linked nucleotides, or derivatives or analogs thereof, that comprise a nucleic acid (e.g., an mRNA). The term also refers to the two-dimensional or three-dimensional state of a nucleic acid. Accordingly, the term “RNA structure” refers to the arrangement or organization of atoms, chemical constituents, elements, motifs, and/or sequence of linked nucleotides, or derivatives or analogs thereof, comprising an RNA molecule (e.g., an mRNA) and/or refers to a two-dimensional and/or three dimensional state of an RNA molecule. Nucleic acid structure can be further demarcated into four organizational categories referred to herein as “molecular structure”, “primary structure”, “secondary structure”, and “tertiary structure” based on increasing organizational complexity.

[0952] Open Reading Frame: As used herein, the term “open reading frame”, abbreviated as “ORF”, refers to a segment or region of an mRNA molecule that encodes a polypeptide. The ORF comprises a continuous stretch of non-overlapping, in-frame codons, beginning with the initiation codon and ending with a stop codon, and is translated by the ribosome.

[0953] Pre Initiation Complex (PIC): As used herein, the term “pre-initiation complex” (alternatively “43S pre-initiation complex”; abbreviated as “PIC”) refers to a ribonucleoprotein complex comprising a 40S ribosomal subunit, eukaryotic initiation factors (eIF1, eIF1A, eIF3, eIF5), and the eIF2-GTP-Met-tRNAᵢ^{Met} ternary complex, that is intrinsically capable of attachment to the 5′ cap of an mRNA molecule and, after attachment, of performing ribosome scanning of the 5′ UTR.

[0954] RNA element: As used herein, the term “RNA element” refers to a portion, fragment, or segment of an RNA molecule that provides a biological function and/or has biological activity (e.g., translational regulatory activity). Modification of a polynucleotide by the incorporation of one or more RNA elements, such as those described herein, provides one or more desirable functional properties to the modified polynucleotide. RNA elements, as described herein, can be naturally-occurring, non-naturally occurring, synthetic, engineered, or any combination thereof. For example, naturally-occurring RNA elements that provide a regulatory activity include elements found throughout the transcriptomes of viruses, prokaryotic and eukaryotic organisms (e.g., humans). RNA elements in particular eukaryotic mRNAs and translated viral RNAs have been shown to be involved in mediating many functions in cells. Exemplary natural RNA elements include, but are not limited to, translation initiation elements (e.g., internal ribosome entry site (IRES), see Kieft et al., (2001) RNA 7(2):194-206), translation enhancer elements (e.g., the APP mRNA translation enhancer element, see Rogers et al., (1999) J Biol Chem 274(10):6421-6431), mRNA stability elements (e.g., AU-rich elements (AREs), see Garneau et al., (2007) Nat Rev Mol Cell Biol 8(2):113-126), translational repression element (see e.g., Blumer et al., (2002) Mech Dev 110(1-2):97-112), protein-binding RNA elements (e.g., iron-responsive element, see Selezneva et al., (2013) J Mol Biol 425(18):3301-3310), cytoplasmic polyadenylation elements (Villalba et al., (2011) Curr Opin Genet Dev 21(4):452-457), and catalytic RNA elements (e.g., ribozymes, see Scott et al., (2009) Biochim Biophys Acta 1789(9-10):634-641).

[0955] Residence time: As used herein, the term “residence time” refers to the time of occupancy of a pre-initiation complex (PIC) or a ribosome at a discrete position or location along an mRNA molecule.

[0956] Translational Regulatory Activity: As used herein, the term “translational regulatory activity” (used interchangeably with “translational regulatory function”) refers to a biological function, mechanism, or process that modulates (e.g., regulates, influences, controls, varies) the activity of the translational apparatus, including the activity of the PIC and/or ribosome. In some aspects, the desired translation regulatory activity promotes and/or enhances the translational fidelity of mRNA translation. In some aspects, the desired translational regulatory activity reduces and/or inhibits leaky scanning.

### 27. EQUIVALENTS AND SCOPE

[0957] Those skilled in the art will recognize, or be able to ascertain using no more than routine experimentation, many equivalents to the specific embodiments in accordance with the invention described herein. The scope of the present invention is not intended to be limited to the above Description, but rather is as set forth in the appended claims.

[0958] In the claims, articles such as “a,” “an,” and “the” can mean one or more than one unless indicated to the contrary or otherwise evident from the context. Claims or descriptions that include “or” between one or more members of a group are considered satisfied if one, more than one, or all of the group members are present in, employed in, or otherwise relevant to a given product or process unless indicated to the contrary or otherwise evident from the context. The invention includes embodiments in which exactly one member of the group is present in, employed in, or otherwise relevant to a given product or process. The invention includes embodiments in which more than one, or all of the group members are present in, employed in, or otherwise relevant to a given product or process.

[0959] It is also noted that the term “comprising” is intended to be open and permits but does not require the inclusion of additional elements or steps. When the term “comprising” is used herein, the term “consisting of” is thus also encompassed and disclosed.

[0960] Where ranges are given, endpoints are included. Furthermore, it is to be understood that unless otherwise indicated or otherwise evident from the context and understanding of one of ordinary skill in the art, values that are expressed as ranges can assume any specific value or subrange within the stated ranges in different embodiments of the invention, to the tenth of the unit of the lower limit of the range, unless the context clearly dictates otherwise.

[0961] In addition, it is to be understood that any particular embodiment of the present invention that falls within the prior art can be explicitly excluded from any one or more of the claims. Since such embodiments are deemed to be known to one of ordinary skill in the art, they can be excluded even if the exclusion is not set forth explicitly herein. Any particular embodiment of the compositions of the invention (e.g., any nucleic acid or protein encoded thereby; any method of production; any method of use; etc.) can be excluded from any one or more claims, for any reason, whether or not related to the existence of prior art.

[0962] All cited sources, for example, references, publications, databases, database entries, and art cited herein, are incorporated into this application by reference, even if not expressly stated in the citation. In case of conflicting statements of a cited source and the instant application, the statement in the instant application shall control.

[0963] Section and table headings are not intended to be limiting.

### EXAMPLES

### Example 1

### Chimeric Polynucleotide Synthesis

### A. Triphosphate Route

[0964] Two regions or parts of a chimeric polynucleotide can be joined or ligated using triphosphate chemistry. According to this method, a first region or part of 100 nucleotides or less can be chemically synthesized with a 5′ monophosphate and terminal 3′desOH or blocked OH. If the region is longer than 80 nucleotides, it can be synthesized as two strands for ligation.

[0965] If the first region or part is synthesized as a non-positionally modified region or part using in vitro transcription (IVT), conversion the 5′monophosphate with subsequent capping of the 3′ terminus can follow. Monophosphate protecting groups can be selected from any of those known in the art.

[0966] The second region or part of the chimeric polynucleotide can be synthesized using either chemical synthesis or IVT methods. IVT methods can include an RNA polymerase that can utilize a primer with a modified cap. Alternatively, a cap of up to 80 nucleotides can be chemically synthesized and coupled to the IVT region or part.

[0967] It is noted that for ligation methods, ligation with DNA T4 ligase, followed by treatment with DNAse should readily avoid concatenation.

[0968] The entire chimeric polynucleotide need not be manufactured with a phosphate-sugar backbone. If one of the regions or parts encodes a polypeptide, then such region or part can comprise a phosphate-sugar backbone.

[0969] Ligation can then be performed using any known click chemistry, orthoclick chemistry, solulink, or other bioconjugate chemistries known to those in the art.

B. Synthetic route

[0970] The chimeric polynucleotide can be made using a series of starting segments. Such segments include:

[0971] (a) Capped and protected 5′ segment comprising a normal 3′OH (SEG. 1)

[0972] (b) 5′ triphosphate segment which can include the coding region of a polypeptide and comprising a normal 3′OH (SEG. 2)

[0973] (c) 5′ monophosphate segment for the 3′ end of the chimeric polynucleotide (e.g., the tail) comprising cordycepin or no 3′OH (SEG. 3)

[0974] After synthesis (chemical or IVT), segment 3 (SEG. 3) can be treated with cordycepin and then with pyrophosphatase to create the 5′monophosphate.

[0975] Segment 2 (SEG. 2) can then be ligated to SEG. 3 using RNA ligase. The ligated polynucleotide can then be purified and treated with pyrophosphatase to cleave the diphosphate. The treated SEG.2-SEG. 3 construct is then purified and SEG. 1 is ligated to the 5′ terminus. A further purification step of the chimeric polynucleotide can be performed.

[0976] Where the chimeric polynucleotide encodes a polypeptide, the ligated or joined segments can be represented as: 5′ UTR (SEG. 1), open reading frame or ORF (SEG. 2) and 3′ UTR+PolyA (SEG. 3).

[0977] The yields of each step can be as much as 90-95%.

### Example 2

### PCR for cDNA Production

[0978] PCR procedures for the preparation of cDNA can be performed using 2× KAPA HIFI™ HotStart ReadyMix by Kapa Biosystems (Woburn, Mass.). This system includes 2×KAPA ReadyMix12.5 μl; Forward Primer (10 μM) 0.75 μl; Reverse Primer (10 μM) 0.75 μl; Template cDNA −100 ng; and dH₂0 diluted to 25.0 μl. The PCR reaction conditions can be: at 95° C. for 5 min. and 25 cycles of 98° C. for 20 sec, then 58° C. for 15 sec, then 72° C. for 45 sec, then 72° C. for 5 min. then 4° C. to termination.

[0979] The reverse primer of the instant invention can incorporate a poly-Tim (SEQ ID NO:271) for a poly-A₁₂₀ (SEQ ID NO:273) in the mRNA. Other reverse primers with longer or shorter poly(T) tracts can be used to adjust the length of the poly(A) tail in the polynucleotide mRNA.

[0980] The reaction can be cleaned up using Invitrogen's PURELINK™ PCR Micro Kit (Carlsbad, Calif.) per manufacturer's instructions (up to 5 μg). Larger reactions will require a cleanup using a product with a larger capacity. Following the cleanup, the cDNA can be quantified using the NANODROP™ and analyzed by agarose gel electrophoresis to confirm the cDNA is the expected size. The cDNA can then be submitted for sequencing analysis before proceeding to the in vitro transcription reaction.

### Example 3

### In Vitro Transcription (IVT)

[0981] The in vitro transcription reactions can generate polynucleotides containing uniformly modified polynucleotides. Such uniformly modified polynucleotides can comprise a region or part of the polynucleotides of the invention. The input nucleotide triphosphate (NTP) mix can be made using natural and un-natural NTPs.

[0982] A typical in vitro transcription reaction can include the following:
[0983] 1 Template cDNA-1.0
[0984] 2 10× transcription buffer (400 mM Tris-HCl pH 8.0, 190 mM MgCl2, 50 mM DTT, 10 mM Spermidine)—2.0 μl
[0985] 3 Custom NTPs (25 mM each)—7.2 μl
[0986] 4 RNase Inhibitor—20 U
[0987] 5 T7 RNA polymerase—3000 U
[0988] 6 dH₂0—Up to 20.0 μl. and
[0989] 7 Incubation at 37° C. for 3 hr-5 hrs.

[0990] The crude IVT mix can be stored at 4° C. overnight for cleanup the next day. 1 U of RNase-free DNase can then be used to digest the original template. After 15 minutes of incubation at 37° C., the mRNA can be purified using Ambion's MEGACLEAR™ Kit (Austin, Tex.) following the manufacturer's instructions. This kit can purify up to 500 μg of RNA. Following the cleanup, the RNA can be quantified using the NanoDrop and analyzed by agarose gel electrophoresis to confirm the RNA is the proper size and that no degradation of the RNA has occurred.

### Example 4

### Enzymatic Capping

[0991] Capping of a polynucleotide can be performed with a mixture includes: IVT RNA 60 μg-180 μg and dH₂0 up to 72 μl. The mixture can be incubated at 65° C. for 5 minutes to denature RNA, and then can be transferred immediately to ice.

[0992] The protocol can then involve the mixing of 10× Capping Buffer (0.5 M Tris-HCl (pH 8.0), 60 mM KCl, 12.5 mM MgCl2) (10.0 μl); 20 mM GTP (5.0 μl); 20 mM S-Adenosyl Methionine (2.5 μl); RNase Inhibitor (100 U); 2′-O-Methyltransferase (400U); Vaccinia capping enzyme (Guanylyl transferase) (40 U); dH₂0 (Up to 28 μl); and incubation at 37° C. for 30 minutes for 60 pg RNA or up to 2 hours for 180 μg of RNA.

[0993] The polynucleotide can then be purified using Ambion's MEGACLEAR™ Kit (Austin, Tex.) following the manufacturer's instructions. Following the cleanup, the RNA can be quantified using the NANODROP™ (ThermoFisher, Waltham, Mass.) and analyzed by agarose gel electrophoresis to confirm the RNA is the proper size and that no degradation of the RNA has occurred. The RNA product can also be sequenced by running a reverse-transcription-PCR to generate the cDNA for sequencing.

### Example 5

### PolyA Tailing Reaction

[0994] Without a poly-T in the cDNA, a poly-A tailing reaction must be performed before cleaning the final product. This can be done by mixing Capped IVT RNA (100 μl); RNase Inhibitor (20 U); 10× Tailing Buffer (0.5 M Tris-HCl (pH 8.0), 2.5 M NaCl, 100 mM MgCl₂) (12.0 μl); 20 mM ATP (6.0 μl); Poly-A Polymerase (20 U); dH₂0 up to 123.5 μl and incubating at 37° C. for 30 min. If the poly-A tail is already in the transcript, then the tailing reaction can be skipped and proceed directly to cleanup with Ambion's MEGACLEAR™ kit (Austin, Tex.) (up to 500 μg). Poly-A Polymerase is, in some cases, a recombinant enzyme expressed in yeast.

[0995] It should be understood that the processivity or integrity of the polyA tailing reaction does not always result in an exact size polyA tail. Hence polyA tails of approximately between 40-200 nucleotides, e.g., about 40, 50, 60, 70, 80, 90, 91, 92, 93, 94, 95, 96, 97, 98, 99, 100, 101, 102, 103, 104, 105, 106, 107, 108, 109, 110, 150-165, 155, 156, 157, 158, 159, 160, 161, 162, 163, 164 or 165 are within the scope of the invention.

### Example 6

### Natural 5′ Caps and 5′ Cap Analogues

[0996] 5′-capping of polynucleotides can be completed concomitantly during the in vitro-transcription reaction using the following chemical RNA cap analogs to generate the 5′-guanosine cap structure according to manufacturer protocols: 3′-O-Me-m7G(5′)ppp(5′) G [the ARCA cap]; G(5′)ppp(5′)A; G(5′)ppp(5′)G; m7G(5′)ppp(5′)A; m7G(5′)ppp(5′)G (New England BioLabs, Ipswich, Mass.). 5′-capping of modified RNA can be completed post-transcriptionally using a Vaccinia Virus Capping Enzyme to generate the “Cap 0” structure: m7G(5′)ppp(5′)G (New England BioLabs, Ipswich, Mass.). Cap 1 structure can be generated using both Vaccinia Virus Capping Enzyme and a 2′-O methyl-transferase to generate: m7G(5′)ppp(5′)G-2′-O-methyl. Cap 2 structure can be generated from the Cap 1 structure followed by the 2′-O-methylation of the 5′-antepenultimate nucleotide using a 2′-O methyl-transferase. Cap 3 structure can be generated from the Cap 2 structure followed by the 2′-O-methylation of the 5′-preantepenultimate nucleotide using a 2′-O methyl-transferase. Enzymes can be derived from a recombinant source.

[0997] When transfected into mammalian cells, the modified mRNAs can have a stability of between 12-18 hours or more than 18 hours, e.g., 24, 36, 48, 60, 72 or greater than 72 hours.

### Example 7

### Capping Assays

### A. Protein Expression Assay

[0998] Polynucleotides encoding a polypeptide, containing any of the caps taught herein, can be transfected into cells at equal concentrations. After 6, 12, 24 and 36 hours post-transfection, the amount of protein secreted into the culture medium can be assayed by ELISA. Synthetic polynucleotides that secrete higher levels of protein into the medium would correspond to a synthetic polynucleotide with a higher translationally-competent Cap structure.

### B. Purity Analysis Synthesis

[0999] Polynucleotides encoding a polypeptide, containing any of the caps taught herein, can be compared for purity using denaturing Agarose-Urea gel electrophoresis or HPLC analysis. Polynucleotides with a single, consolidated band by electrophoresis correspond to the higher purity product compared to polynucleotides with multiple bands or streaking bands. Synthetic polynucleotides with a single HPLC peak would also correspond to a higher purity product. The capping reaction with a higher efficiency would provide a more pure polynucleotide population.

### C. Cytokine Analysis

[1000] Polynucleotides encoding a polypeptide, containing any of the caps taught herein, can be transfected into cells at multiple concentrations. After 6, 12, 24 and 36 hours post-transfection the amount of pro-inflammatory cytokines such as TNF-alpha and IFN-beta secreted into the culture medium can be assayed by ELISA. Polynucleotides resulting in the secretion of higher levels of pro-inflammatory cytokines into the medium would correspond to polynucleotides containing an immune-activating cap structure.

### D. Capping Reaction Efficiency

[1001] Polynucleotides encoding a polypeptide, containing any of the caps taught herein, can be analyzed for capping reaction efficiency by LC-MS after nuclease treatment. Nuclease treatment of capped polynucleotides would yield a mixture of free nucleotides and the capped 5′-5-triphosphate cap structure detectable by LC-MS. The amount of capped product on the LC-MS spectra can be expressed as a percent of total polynucleotide from the reaction and would correspond to capping reaction efficiency. The cap structure with higher capping reaction efficiency would have a higher amount of capped product by LC-MS.

### Example 8

### Agarose Gel Electrophoresis of Modified RNA or RT PCR Products

[1002] Individual polynucleotides (200-400 ng in a 20 μl volume) or reverse transcribed PCR products (200-400 ng) can be loaded into a well on a non-denaturing 1.2% Agarose E-Gel (Invitrogen, Carlsbad, Calif.) and run for 12-15 minutes according to the manufacturer protocol.

### Example 9

### Nanodrop Modified RNA Quantification and UV Spectral Data

[1003] Modified polynucleotides in TE buffer (1 μl) can be used for Nanodrop UV absorbance readings to quantitate the yield of each polynucleotide from a chemical synthesis or in vitro transcription reaction.

### Example 10

### Method of Screening for Protein Expression

### A. Electrospray Ionization

[1004] A biological sample that can contain proteins encoded by a polynucleotide administered to the subject can be prepared and analyzed according to the manufacturer protocol for electrospray ionization (ESI) using 1, 2, 3 or 4 mass analyzers. A biologic sample can also be analyzed using a tandem ESI mass spectrometry system.

[1005] Patterns of protein fragments, or whole proteins, can be compared to known controls for a given protein and identity can be determined by comparison.

### B. Matrix-Assisted Laser Desorption/Ionization

[1006] A biological sample that can contain proteins encoded by one or more polynucleotides administered to the subject can be prepared and analyzed according to the manufacturer protocol for matrix-assisted laser desorption/ionization (MALDI).

[1007] Patterns of protein fragments, or whole proteins, can be compared to known controls for a given protein and identity can be determined by comparison.

### C. Liquid Chromatography-Mass Spectrometry-Mass Spectrometry

[1008] A biological sample, which can contain proteins encoded by one or more polynucleotides, can be treated with a trypsin enzyme to digest the proteins contained within. The resulting peptides can be analyzed by liquid chromatography-mass spectrometry-mass spectrometry (LC/MS/MS). The peptides can be fragmented in the mass spectrometer to yield diagnostic patterns that can be matched to protein sequence databases via computer algorithms. The digested sample can be diluted to achieve 1 ng or less starting material for a given protein. Biological samples containing a simple buffer background (e.g., water or volatile salts) are amenable to direct in-solution digest; more complex backgrounds (e.g., detergent, non-volatile salts, glycerol) require an additional clean-up step to facilitate the sample analysis.

[1009] Patterns of protein fragments, or whole proteins, can be compared to known controls for a given protein and identity can be determined by comparison.

### Example 11

### Production of Nanoparticle Compositions

### A. Production of Nanoparticle Compositions

[1010] Nanoparticles can be made with mixing processes such as microfluidics and T-junction mixing of two fluid streams, one of which contains the polynucleotide and the other has the lipid components.

[1011] Lipid compositions are prepared by combining an ionizable amino lipid disclosed herein, e.g., a lipid according to Formula (I) such as Compound II or a lipid according to Formula (III) such as Compound VI, a phospholipid (such as DOPE or DSPC, obtainable from Avanti Polar Lipids, Alabaster, Ala.), a PEG lipid (such as 1,2 dimyristoyl sn glycerol methoxypolyethylene glycol, also known as PEG-DMG, obtainable from Avanti Polar Lipids, Alabaster, Ala.), and a structural lipid (such as cholesterol, obtainable from Sigma Aldrich, Taufkirchen, Germany, or a corticosteroid (such as prednisolone, dexamethasone, prednisone, and hydrocortisone), or a combination thereof) at concentrations of about 50 mM in ethanol. Solutions should be refrigerated for storage at, for example, −20° C. Lipids are combined to yield desired molar ratios and diluted with water and ethanol to a final lipid concentration of between about 5.5 mM and about 25 mM.

[1012] Nanoparticle compositions including a polynucleotide and a lipid composition are prepared by combining the lipid solution with a solution including the a polynucleotide at lipid composition to polynucleotide wt:wt ratios between about 5:1 and about 50:1. The lipid solution is rapidly injected using a NanoAssemblr microfluidic based system at flow rates between about 10 ml/min and about 18 ml/min into the polynucleotide solution to produce a suspension with a water to ethanol ratio between about 1:1 and about 4:1.

[1013] For nanoparticle compositions including an RNA, solutions of the RNA at concentrations of 0.1 mg/ml in deionized water are diluted in 50 mM sodium citrate buffer at a pH between 3 and 4 to form a stock solution.

[1014] Nanoparticle compositions can be processed by dialysis to remove ethanol and achieve buffer exchange. Formulations are dialyzed twice against phosphate buffered saline (PBS), pH 7.4, at volumes 200 times that of the primary product using Slide-A-Lyzer cassettes (Thermo Fisher Scientific Inc., Rockford, Ill.) with a molecular weight cutoff of 10 kD. The first dialysis is carried out at room temperature for 3 hours. The formulations are then dialyzed overnight at 4° C. The resulting nanoparticle suspension is filtered through 0.2 μm sterile filters (Sarstedt, Nümbrecht, Germany) into glass vials and sealed with crimp closures. Nanoparticle composition solutions of 0.01 mg/ml to 0.10 mg/ml are generally obtained.

[1015] The method described above induces nano-precipitation and particle formation. Alternative processes including, but not limited to, T-junction and direct injection, can be used to achieve the same nano-precipitation.

### B. Characterization of Nanoparticle Compositions

[1016] A Zetasizer Nano ZS (Malvern Instruments Ltd, Malvern, Worcestershire, UK) can be used to determine the particle size, the polydispersity index (PDI) and the zeta potential of the nanoparticle compositions in 1×PBS in determining particle size and 15 mM PBS in determining zeta potential.

[1017] Ultraviolet-visible spectroscopy can be used to determine the concentration of a polynucleotide (e.g., RNA) in nanoparticle compositions. 100 μL of the diluted formulation in 1×PBS is added to 900 μL of a 4:1 (v/v) mixture of methanol and chloroform. After mixing, the absorbance spectrum of the solution is recorded, for example, between 230 nm and 330 nm on a DU 800 spectrophotometer (Beckman Coulter, Beckman Coulter, Inc., Brea, Calif.). The concentration of polynucleotide in the nanoparticle composition can be calculated based on the extinction coefficient of the polynucleotide used in the composition and on the difference between the absorbance at a wavelength of, for example, 260 nm and the baseline value at a wavelength of, for example, 330 nm.

[1018] For nanoparticle compositions including an RNA, a QUANT-IT™ RIBOGREEN® RNA assay (Invitrogen Corporation Carlsbad, Calif.) can be used to evaluate the encapsulation of an RNA by the nanoparticle composition. The samples are diluted to a concentration of approximately 5 μg/mL in a TE buffer solution (10 mM Tris-HCl, 1 mM EDTA, pH 7.5). 50 μL of the diluted samples are transferred to a polystyrene 96 well plate and either 50 μL of TE buffer or 50 μL of a 2% Triton X-100 solution is added to the wells. The plate is incubated at a temperature of 37° C. for 15 minutes. The RIBOGREEN® reagent is diluted 1:100 in TE buffer, and 100 μL of this solution is added to each well. The fluorescence intensity can be measured using a fluorescence plate reader (Wallac Victor 1420 Multilablel Counter; Perkin Elmer, Waltham, Mass.) at an excitation wavelength of, for example, about 480 nm and an emission wavelength of, for example, about 520 nm. The fluorescence values of the reagent blank are subtracted from that of each of the samples and the percentage of free RNA is determined by dividing the fluorescence intensity of the intact sample (without addition of Triton X-100) by the fluorescence value of the disrupted sample (caused by the addition of Triton X-100).

[1019] Exemplary formulations of the nanoparticle compositions are presented in the Table 6 below. The term “Compound” refers to an ionizable lipid such as MC3, Compound II, or Compound VI. “Phospholipid” can be DSPC or DOPE. “PEG-lipid” can be PEG-DMG or Compound I.

TABLE 6
Exemplary Formulations of Nanoparticles

| Composition | |
|---|---|
| (mol %) | Components |
| 40:20:38.5:1.5 | Compound:Phospholipid:Chol:PEG-lipid |
| 45:15:38.5:1.5 | Compound:Phospholipid:Chol:PEG-lipid |
| 50:10:38.5:1.5 | Compound:Phospholipid:Chol:PEG-lipid |
| 55:5:38.5:1.5 | Compound:Phospholipid:Chol:PEG-lipid |
| 60:5:33.5:1.5 | Compound:Phospholipid:Chol:PEG-lipid |
| 45:20:33.5:1.5 | Compound:Phospholipid:Chol:PEG-lipid |
| 50:20:28.5:1.5 | Compound:Phospholipid:Chol:PEG-lipid |
| 55:20:23.5:1.5 | Compound:Phospholipid:Chol:PEG-lipid |
| 60:20:18.5:1.5 | Compound:Phospholipid:Chol:PEG-lipid |
| 40:15:43.5:1.5 | Compound:Phospholipid:Chol:PEG-lipid |
| 50:15:33.5:1.5 | Compound:Phospholipid:Chol:PEG-lipid |
| 55:15:28.5:1.5 | Compound:Phospholipid:Chol:PEG-lipid |
| 60:15:23.5:1.5 | Compound:Phospholipid:Chol:PEG-lipid |
| 40:10:48.5:1.5 | Compound:Phospholipid:Chol:PEG-lipid |
| 45:10:43.5:1.5 | Compound:Phospholipid:Chol:PEG-lipid |
| 55:10:33.5:1.5 | Compound:Phospholipid:Chol:PEG-lipid |
| 60:10:28.5:1.5 | Compound:Phospholipid:Chol:PEG-lipid |
| 40:5:53.5:1.5 | Compound:Phospholipid:Chol:PEG-lipid |
| 45:5:48.5:1.5 | Compound:Phospholipid:Chol:PEG-lipid |
| 50:5:43.5:1.5 | Compound:Phospholipid:Chol:PEG-lipid |
| 40:20:40:0 | Compound:Phospholipid:Chol:PEG-lipid |
| 45:20:35:0 | Compound:Phospholipid:Chol:PEG-lipid |
| 50:20:30:0 | Compound:Phospholipid:Chol:PEG-lipid |
| 55:20:25:0 | Compound:Phospholipid:Chol:PEG-lipid |
| 60:20:20:0 | Compound:Phospholipid:Chol:PEG-lipid |
| 40:15:45:0 | Compound:Phospholipid:Chol:PEG-lipid |
| 45:15:40:0 | Compound:Phospholipid:Chol:PEG-lipid |
| 50:15:35:0 | Compound:Phospholipid:Chol:PEG-lipid |
| 55:15:30:0 | Compound:Phospholipid:Chol:PEG-lipid |
| 60:15:25:0 | Compound:Phospholipid:Chol:PEG-lipid |
| 40:10:50:0 | Compound:Phospholipid:Chol:PEG-lipid |
| 45:10:45:0 | Compound:Phospholipid:Chol:PEG-lipid |
| 50:10:40:0 | Compound:Phospholipid:Chol:PEG-lipid |
| 55:10:35:0 | Compound:Phospholipid:Chol:PEG-lipid |
| 60:10:30:0 | Compound:Phospholipid:Chol:PEG-lipid |

### Example 12

### Preparation of Nanoparticle and Citrate Saline Compositions

[1020] Stock solution of lipids in ethanol were prepared from Compound II, distearoyl phosphatidylcholine (DSPC, Avanti Polar Lipids), cholesterol (Sigma), and 1,2-dimyristoyl-rac-glycero-3-methoxypolyethylene glycol-2000 (DMG-PEG2000 from NOF Corporation). The lipids were mixed in ethanol 99.5% to a total lipid concentration of 12.5 mM. The composition was Compound II, DSPC, Cholesterol, DMG-PEG2000 at the ratio of 50:10:38.5:1.5% mol. The VEGF-A modified RNA (e.g., SEQ ID NO: 1, SEQ ID NO: 2, SEQ ID NO: 5, or SEQ ID NO: 6) was thawed and diluted to 6.25 mM in sodium acetate buffer and HyClone water at a concentration corresponding to a total lipid:mRNA weight ratio of 11:1 (charge ratio nitrogen:phosphate (N:P) of 3) in the final formulation. The final formulation after dilution was as follows:

TABLE 7
Compound II-LNP 1:11 (N.P = 3),
mRNA concentration 0.06 mg/mL

| LNP Component | Amount (mg/mL) |
|---|---|
| Modified VEGF-A RNA | 0.06 |
| Compound II | 0.37 |
| DSPC | 0.08 |
| Cholesterol | 0.16 |
| DMG-PEG2000 | 0.04 |

TABLE 8
Sequences

| Description | Sequence (SEQ ID NO) |
|---|---|
| modified | 5′ ^{7Me}GₚₚₚG_{2′Ome}GGAAAUAAGAGAGAAAAGAAGAGUAAGAAGAAAUAUAAGA |
| RNA | GCCACCAUGAACUUUCUGCUGUCUUGGGUGCAUUGGAGCCUUGCCUUGCUGC |
| encoding | UCUACCUCCACCAUGCCAAGUGGUCCCAGGCUGCACCCAUGGCAGAAGGAGG |
| VEGF-A | AGGGCAGAAUCAUCACGAAGUGGUGAAGUUCAUGGAUGUCUAUCAGCGCAGC |
| | UACUGCCAUCCAAUCGAGACCCUGGUGGACAUCUUCCAGGAGUACCCUGAUG |
| | AGAUCGAGUACAUCUUCAAGCCAUCCUGUGUGCCCCUGAUGCGAUGCGGGGG |
| | CUGCUGCAAUGACGAGGGCCUGGAGUGUGUGCCCACUGAGGAGUCCAACAUC |
| | ACCAUGCAGAUUAUGCGGAUCAAACCUCACCAAGGCCAGCACAUAGGAGAGA |
| | UGAGCUUCCUACAGCACAACAAAUGUGAAUGCAGACCAAAGAAAGAUAGAGC |
| | AAGACAAGAAAAUCCCUGUGGGCCUUGCUCAGAGCGGAGAAAGCAUUUGUUU |
| | GUACAAGAUCCGCAGACGUGUAAAUGUUCCUGCAAAAACACAGACUCGCGUU |
| | GCAAGGCGAGGCAGCUUGAGUUAAACGAACGUACUUGCAGAUGUGACAAGCC |
| | GAGGCGGUGAUAAUAGGCUGGAGCCUCGGUGGCCAUGCUUCUUGCCCCUUGG |
| | GCCUCCCCCCAGCCCCUCCUCCCCUUCCUGCACCCGUACCCCCGUGGUCUUU |
| | GAAUAAAGUCUGAGUGGGCGGCAAAAAAAAAAAAAAAAAAAAAAAAAAAAAA |
| | AAAAAAAAAAAAAAAAAAAAAAAAAAAAAAAAAAAAAAAAAAAAAAAAAAAA |
| | AAAAAAAAAAAAAAAAAAUCUAGOH 3′ |
| | Wherein: |
| | A, C, G & U AMP, CMP, GMP & N1-methyl-pseudoUMP, respectively |
| | Me = methyl |
| | p = inorganic phosphate |
| | (SEQ ID NO: 1) |
| Amino acid | MNFLLSWVHWSLALLLYLHHAKWSQAAPMAEGGGQNHHEVVKFMDVYQRSYC |
| sequence of | HPIETLVDIFQEYPDEIEYIFKPSCVPLMRCGGCCNDEGLECVPTEESNITM |
| human | QIMRIKPHQGQHIGEMSFLQHNKCECRPKKDRARQENPCGPCSERRKHLFVQ |
| VEGF-A | DPQTCKCSCKNTDSRCKARQLELNERTCRCDKPRR (SEQ ID NO: 212) |
| isoform | |
| VEGF-165 | |
| A modified | 5′ ^{7Me}GₚₚₚG_{2′Ome}AGGAAAUAAGAGAGAAAAGAAGAGUAAGAAGAAAUAUAAG |
| RNA | AGCCACCAUGAACUUUCUGCUGUCUUGGGUGCAUUGGAGCCUUGCCUUGCUG |
| encoding | CUCUACCUCCACCAUGCCAAGUGGUCCCAGGCUGCACCCAUGGCAGAAGGAG |
| VEGF-A | GAGGGCAGAAUCAUCACGAAGUGGUGAAGUUCAUGGAUGUCUAUCAGCGCAG |
| | CUACUGCCAUCCAAUCGAGACCCUGGUGGACAUCUUCCAGGAGUACCCUGAU |
| | GAGAUCGAGUACAUCUUCAAGCCAUCCUGUGUGCCCCUGAUGCGAUGCGGGG |
| | GCUGCUGCAAUGACGAGGGCCUGGAGUGUGUGCCCACUGAGGAGUCCAACAU |
| | CACCAUGCAGAUUAUGCGGAUCAAACCUCACCAAGGCCAGCACAUAGGAGAG |
| | AUGAGCUUCCUACAGCACAACAAAUGUGAAUGCAGACCAAAGAAAGAUAGAG |
| | CAAGACAAGAAAAUCCCUGUGGGCCUUGCUCAGAGCGGAGAAAGCAUUUGUU |
| | UGUACAAGAUCCGCAGACGUGUAAAUGUUCCUGCAAAAACACAGACUCGCGU |
| | UGCAAGGCGAGGCAGCUUGAGUUAAACGAACGUACUUGCAGAUGUGACAAGC |
| | CGAGGCGGUGAUAAUAGGCUGGAGCCUCGGUGGCCAUGCUUCUUGCCCCUUG |
| | GGCCUCCCCCCAGCCCCUCCUCCCCUUCCUGCACCCGUACCCCCGUGGUCUU |
| | UGAAUAAAGUCUGAGUGGGCGGCAAAAAAAAAAAAAAAAAAAAAAAAAAAAA |
| | AAAAAAAAAAAAAAAAAAAAAAAAAAAAAAAAAAAAAAAAAAAAAAAAAAAA |
| | AAAAAAAAAAAAAAAAAAAUCUAGOH 3′ |
| | Wherein: |
| | A, C, G & U AMP, CMP, GMP & N1-methyl-pseudoUMP, respectively |
| | Me = methyl |
| | p = inorganic phosphate |
| | (SEQ ID NO: 2) |
| modified | 5′ ^{7Me}pppGGGGAAAUAAGAGAGAAAAGAAGAGUAAGAAGAAAUAUAAGAGCCA |
| RNA | CCAUGAACUUUCUCCUUUCUUGGGUGCAUUGGAGCCUUGCCUUGUUACUCUA |
| encoding | CCUCCACCACGCCAAGUGGUCCCAGGCCGCACCCAUGGCAGAAGGAGGAGGG |
| VEGF-A | CAGAAUCAUCACGAAGUGGUGAAGUUCAUGGACGUCUAUCAGCGCAGCUACU |
| (VEGF-01- | GCCAUCCAAUCGAGACACUGGUGGACAUCUUCCAGGAGUACCCUGAUGAGAU |
| 012) | CGAGUACAUCUUCAAGCCAUCCUGUGUGCCCCUGAUGCGAUGCGGCGGCUGC |
| | UGCAAUGACGAGGGCCUGGAGUGUGUGCCUACUGAGGAGUCCAACAUCACCA |
| | UGCAGAUUAUGCGGAUCAAACCUCACCAAGGCCAGCACAUAGGAGAGAUGAG |
| | CUUCCUACAGCACAACAAAUGUGAAUGCAGACCAAAGAAAGAUAGAGCAAGA |
| | CAAGAGAAUCCCUGUGGGCCUUGCUCAGAGCGGAGAAAGCAUUUGUUUGUAC |
| | AAGAUCCGCAGACGUGUAAAUGUUCCUGCAAGAACACAGACUCGCGUUGCAA |
| | GGCGAGGCAGCUUGAGUUAAACGAACGUACUUGCAGAUGUGACAAGCCGAGG |
| | CGGUGAUAAUAGGCUGGAGCCUCGGUGGCCAUGCUUCUUGCCCCUUGGGCCU |
| | CCCCCCAGCCCCUCCUCCCCUUCCUGCACCCGUACCCCCGUGGUCUUUGAAU |
| | AAAGUCUGAGUGGGCGGCAAAAAAAAAAAAAAAAAAAAAAAAAAAAAAAAAA |
| | AAAAAAAAAAAAAAAAAAAAAAAAAAAAAAAAAAAAAAAAAAAAAAAAAAAA |
| | AAAAAAAAAAAAAAUCUAG 3′ |
| | Wherein: |
| | A, C, G & U AMP, CMP, GMP & N1-methyl-pseudoUMP, respectively |
| | p inorganic phosphate |
| | (SEQ ID NO: 5) |
| modified | 5′ ^{7Me}GpppAGGAAAUAAGAGAGAAAAGAAGAGUAAGAAGAAAUAUAAGAGCC |
| RNA | ACCAUGAACUUUCUGCUGUCUUGGGUGCAUUGGAGCCUUGCCUUGCUGCUCU |
| encoding | ACCUCCACCAUGCCAAGUGGUCCCAGGCUGCACCCAUGGCAGAAGGAGGAGG |
| VEGF-A | GCAGAAUCAUCACGAAGUGGUGAAGUUCAUGGAUGUCUAUCAGCGCAGCUAC |
| | UGCCAUCCAAUCGAGACCCUGGUGGACAUCUUCCAGGAGUACCCUGAUGAGA |
| | UCGAGUACAUCUUCAAGCCAUCCUGUGUGCCCCUGAUGCGAUGCGGGGGCUG |
| | CUGCAAUGACGAGGGCCUGGAGUGUGUGCCCACUGAGGAGUCCAACAUCACC |
| | AUGCAGAUUAUGCGGAUCAAACCUCACCAAGGCCAGCACAUAGGAGAGAUGA |
| | GCUUCCUACAGCACAACAAAUGUGAAUGCAGACCAAAGAAAGAUAGAGCAAG |
| | ACAAGAAAAUCCCUGUGGGCCUUGCUCAGAGCGGAGAAAGCAUUUGUUUGUA |
| | CAAGAUCCGCAGACGUGUAAAUGUUCCUGCAAAAACACAGACUCGCGUUGCA |
| | AGGCGAGGCAGCUUGAGUUAAACGAACGUACUUGCAGAUGUGACAAGCCGAG |
| | GCGGUGAUAAUAGGCUGGAGCCUCGGUGGCCAUGCUUCUUGCCCCUUGGGCC |
| | UCCCCCCAGCCCCUCCUCCCCUUCCUGCACCCGUACCCCCGUGGUCUUUGAA |
| | UAAAGUCUGAGUGGGCGGCAAAAAAAAAAAAAAAAAAAAAAAAAAAAAAAAA |
| | AAAAAAAAAAAAAAAAAAAAAAAAAAAAAAAAAAAAAAAAAAAAAAAAAAAA |
| | AAAAAAAAAAAAAAAUCUAG 3′ |
| | Wherein: |
| | A, C, G & U AMP, CMP, GMP & N1-methyl-pseudoUMP, respectively |
| | p = inorganic phosphate |
| | (SEQ ID NO: 6) |
| non- | 5′ ^{7me}GₚₚₚGGGGAAAUAAGAGAGAAAAGAAGAGUAAGAAGAAAUAUAAGAGCCA |
| translatable | CCACGAACUUUGUGCUCUCUUGGGUGCAUUGGAGCCUUGCCUUGCUGCUCUA |
| VEGF-A | CCUCCACCACGCCAAGUGGUCCCAGGCCGCACCCACGGCAGAAGGAGGAGGG |
| modified | CAGAAUCAUCACGAAGUGGUGAAGUUCACGGACGUCUAUCAGCGCAGCUACU |
| RNA | GCCAUCCAAUCGAGACCCUCGUGGACAUCUUCCAGGAGUACCCUCACGAGAU |
| | CGAGUACAUCUUCAAGCCAUCCUGUGUGCCCCUGACGCGACGCGGGGGCUGC |
| | UGCAACGACGAGGGCCUCGAGUGUGUGCCCACCGAGGAGUCCAACACCACCA |
| | CGCAGAUUACGCGGAUCAAACCUCACCAAGGCCAGCACAUAGGAGAGACGAG |
| | CUUCCUACAGCACAACAAACGUGAACGCAGACCAAAGAAAGAUAGAGCAAGA |
| | CAAGAAAAUCCCUGUGGGCCUUGCUCAGAGCGGAGAAAGCAUUUGUUUGUAC |
| | AAGAUCCGCAGACGUGUAAACGUUCCUGCAAAAACACAGACUCGCGUUGCAA |
| | GGCGAGGCAGCUUGAGUUAAACGAACGUACUUGCAGACGUGACAAGCCGAGG |
| | CGGUGAUAAUAGGUUGGAGCCUCGGUGGCCACGCUUCUUGCCCCUUGGGCCU |
| | CCCCCCAGCCCCUCCUCCCCUUCCUGCACCCGUACCCCCGUGGUCUUUGAAU |
| | AAAGUCUGAGUGGGCGGCAAAAAAAAAAAAAAAAAAAAAAAAAAAAAAAAAA |
| | AAAAAAAAAAAAAAAAAAAAAAAAAAAAAAAAAAAAAAAAAAAAAAAAAAAA |
| | AAAAAAAAAAAAAA 3′ |
| | Wherein: |
| | A, C, G & U AMP, CMP, GMP & N1-methyl-pseudoUMP, respectively |
| | p = inorganic phosphate |
| | (SEQ ID NO: 7) |

[1021] The Compound II-LNP compositions were prepared by rapidly mixing ethanol solution containing the lipids and aqueous solution of a modified VEGF-A RNA on a microfluidic device, followed by dialysis in phosphate buffered saline (PBS). Briefly, the modified VEGF-A RNA solution and the lipid solution were injected into a microfluidic mixing device (NanoAssemblr™ (Precision Nanosystems)) at a volumetric ratio of aqueous to ethanol 3:1 and flow rates of 12-14 mL/min using two syringes, which were controlled by syringe pumps. Ethanol was removed by dialyzing Compound II-LNP compositions against PBS buffer overnight using membranes with 10 KD cutoff. Compound II-LNP compositions were characterized by particle size (63 nm), polydispersity index (0.10) and encapsulation (96%). Compound II-LNP compositions were diluted to a final concentration of 0.06 mg/mL with PBS and filtered sterile. Compound II-LNP compositions were stored refrigerated. The size and polydispersity of Compound II-LNPs was determined by dynamic light scattering using a Zetasizer Nano ZS (Malvern Instruments Ltd) and the encapsulation and concentration of mRNA in the Compound II-LNP formulations were determined using the RiboGreen assay.

[1022] DLin-MC3-DMA Lipid Nanoparticles (MC3-LNPs): Stock solution of lipids in ethanol were prepared from DLin-MC3-DMA (synthesized as described in Jayaraman, M., et al., Angew Chem Int Ed Engl, 2012, 51(34), p. 8529-33), distearoyl phosphatidylcholine (DSPC, Avanti Polar Lipids), cholesterol (Sigma), and 1,2-dimyristoyl-rac-glycero-3-methoxypolyethylene glycol-2000 (DMG-PEG2000 from NOF Corporation). The lipids were mixed in ethanol 99.5% to a total lipid concentration of 12.5 mM. The composition was DLin-MC3-DMA, DSPC, Cholesterol, DMG-PEG2000 at the ratio of 50:10:38.5:1.5% mol. The VEGF-A modified RNA (e.g., SEQ ID NO: 1, SEQ ID NO: 2, SEQ ID NO: 5, or SEQ ID NO: 6) was thawed and diluted to 6.25 mM in sodium acetate buffer (pH 5) and HyClone water at a concentration corresponding to a total lipid:mRNA weight ratio of 10.25:1 (charge ratio nitrogen:phosphate (N:P) of 3) in the final formulation. The final formulations after dilution were as follows:

TABLE 9
LNP 1:10.25 (N:P = 3), mRNA
concentration 0.075 mg/mL

| LNP Component | Amount (mg/mL) |
|---|---|
| VEGF-A modified RNA | 0.075 |
| DLin-MC3-DMA | 0.42 |
| DSPC | 0.10 |
| Cholesterol | 0.20 |
| DMG-PEG2000 | 0.05 |

[1023] The structure of DLin-MC3-DMA is:

[chemical structure]

[1024] Lipid nanoparticle (LNP) compositions: The LNP compositions were prepared by rapidly mixing ethanol solution containing the lipids and aqueous solution of VEGF-A modified RNA on a microfluidic device, followed by dialysis in phosphate buffered saline (PBS). Briefly, the VEGF-A modified RNA solution and the lipid solution were injected into a microfluidic mixing device (NanoAssemblr™ (Precision Nanosystems)) at a volumetric ratio of aqueous to ethanol 3:1 and flow rates of 12-14 mL/min using two syringes, which were controlled by syringe pumps. Following microfluidic mixing, the MC3-LNPs were dialyzed overnight against phosphate buffered saline (pH 7.4) using Slide-A-Lyzer™ G2 dialysis cassettes with a molecular weight cut-off of 10k (Thermo Scientific).

[1025] LNP compositions were characterized by particle size (77 to 85 nm), VEGF-A modified RNA concentration (0.076 to 0.1 mg/mL), polydispersity index (0.04 to 0.08) and encapsulation (96 to 98%). LNP compositions were diluted to a final concentration of 0.075 mg/mL with PBS and filtered sterile. LNP compositions were stored refrigerated. The size and polydispersity of MC3-LNPs was determined by dynamic light scattering using a Zetasizer Nano ZS (Malvern Instruments Ltd) and the encapsulation and concentration of mRNA in the MC3-LNP formulations were determined using the RiboGreen assay.

[1026] Citrate saline compositions: Citrate saline compositions were prepared by diluting a thawed modified VEGF-A RNA solution with HyClone water and a concentrated buffer solution to a final composition of 10 mM sodium citrate and 130 mM sodium chloride at pH 6.5.

### Example 13

### Assessment of Wound Healing Following Intradermal Injection of Modified RNA Encoding a Wound Healing Polypeptide in Mouse

[1027] A MC3 lipid nanoparticle composition comprising a modified VEGF-A RNA and DLin-MC3-DMA was prepared as in Example 13 with VEGF-A modified RNA having the sequence of SEQ ID NO: 5.

[1028] A second MC3 lipid nanoparticle composition comprising a non-translatable (NT) modified VEGF-A RNA and DLin-MC3-DMA was prepared as in Example 13 with VEGF-A modified RNA having the sequence of SEQ ID NO: 7.

[1029] Male db/db mice were used. These mice are an established model of Type II diabetes and have impaired wound healing as compared to wild-type mice.

[1030] FIG. 1 provides a timeline of the surgical procedure, treatment, and observation time points of the study. Glucose and body weight were measured the week before the start of study and at termination. The mice were randomized according to fasting (4 hours) glucose levels, which were measured the week before surgery. The mice were anesthetized with isoflurane before undergoing surgery. The surgical procedure was started by removing the hair on the back of the mice by using clippers and hair removal cream. One wound on the back of each mouse was made by creating a mark with a 10 mm biopsy punch and then cutting it out. The wound was covered by a tegaderm transparent dressing to protect the wound. A self-adhering elastic bandage was placed around the mouse covering the wound area, and an injection of analgesic (Tamgesic at 0.08 mg/ml) was administered at a dosage of 0.05-0.1 mg/kg according to the weight of the mouse.

[1031] The mice were separated into three treatment groups: (a) citrate/saline solution (10 mM sodium citrate and 130 mM sodium chloride at pH 6.5) (n=7), (b) mRNA VEGF NT 3 μg MC3 (non-translatable VEGF-A modified RNA formulated with MC3 LNP) (n=7), and (c) mRNA VEGF 3 μg MC3 (modified VEGF-A RNA formulated with MC3 LNP) (n=7). The treatment solutions were injected intradermally as 4 injections (10 μl each) around the wound (40 μl total), as a single dose at day 3 (FIG. 1).

[1032] The wounds were examined every 3rd or 4th day until all wounds were healed, for up to 17 days. The tegaderm was removed and replaced after examination. Pictures of the wounds were taken with a Canon camera at a fixed distance from the wound. The wound area was determined by tracing the wound margin using the image analyzing software Image J, and then calculated as a percent area of the baseline area. Statistical evaluation was done with an unpaired, two-sided t-test, and p-values<0.05 were considered significant.

[1033] As shown in the results in Table 10 and FIG. 2, intradermal injection of a lipid nanoparticle composition comprising 3 μg of modified VEGF-A RNA formulated with MC3 significantly improved wound healing when compared to a lipid nanoparticle composition comprising 3 μg of non-translatable VEGF-A formulated with MC3, or citrate saline, as demonstrated by the decrease in the percent of open wound area.

TABLE 10
% of open wound original area from baseline (Day 3)

| | Day 3 | Day 7 | Day 10 | Day 14 | Day 17 |
|---|---|---|---|---|---|
| Formulation | (%) | (%) | (%) | (%) | (%) |
| Saline/citrate | 100.0 | 39.6 | 16.4 | 5.6 | 0.0 |
| mRNA VEGF-A | 100.0 | 31.7 | 12.7 | 2.4 | 0.0 |
| NT (3 μg) MC3 | | | | | |
| mRNA VEGF-A | 100.0 | 23.3 | 1.3 | 0.0 | 0.0 |
| (3 μg) MC3 | | | | | |

### Example 14

### Assessment of Wound Healing Following Topical Application of Modified RNA Encoding a Wound Healing Polypeptide in Mouse

[1034] A MC3 lipid nanoparticle composition comprising a modified VEGF-A RNA and DLin-MC3-DMA was prepared as in Example 13 with VEGF-A modified RNA having the sequence of SEQ ID NO: 5.

[1035] Male db/db mice were used. These mice are an established model of Type II diabetes and have impaired wound healing as compared to wild-type mice.

[1036] FIG. 3 provides a timeline of the surgical procedure, treatment, and observation time points of the study. Glucose and body weight were measured the week before the start of study and at termination. The mice were randomized according to fasting (4 hours) glucose levels, which were measured the week before surgery. The mice were anesthetized with isoflurane before undergoing surgery. The surgical procedure was started by removing the hair on the back of the mice by using clippers and hair removal cream. One wound on the back of each mouse was made by creating a mark with a 10 mm biopsy punch and then cutting it out. The wound was covered by a tegaderm transparent dressing to protect the wound. A self-adhering elastic bandage was placed around the mouse covering the wound area, and an injection of analgesic (Tamgesic at 0.08 mg/ml) was administered at a dosage of 0.05-0.1 mg/kg according to the weight of the mouse.

[1037] The mice were separated into two treatment groups: (a) citrate/saline solution (10 mM sodium citrate and 130 mM sodium chloride at pH 6.5) (n=5), and (b) mRNA VEGF 3 μg MC3 (n=5). The treatment solutions were administered via topical application through a needle inserted through the tegaderm at day 0 and day 3 (FIG. 3).

[1038] The wounds were examined every 3rd or 4th day until all wounds were healed, for up to 17 days. The tegaderm was removed and replaced after examination. Pictures of the wounds were taken with a Canon camera at a fixed distance from the wound. The wound area was determined by tracing the wound margin using the image analyzing software Image J, and then calculated as a percent area of the baseline area. Statistical evaluation was done with an unpaired, two-sided t-test, and p-values<0.05 were considered significant.

[1039] As shown in the results in Table 11 and FIG. 4, topical application of a lipid nanoparticle composition comprising 3 μg of modified VEGF-A RNA formulated with MC3 significantly improved wound healing when compared to applied saline citrate, as demonstrated by the decrease in the percent of open wound area.

TABLE 11
% of open wound original area from baseline (Day 0)

| | Day 0 | Day 3 | Day 7 | Day 10 | Day 14 | Day 17 |
|---|---|---|---|---|---|---|
| Formulation | (%) | (%) | (%) | (%) | (%) | (%) |
| Saline/citrate | 100.0 | 83.3 | 34.1 | 16.7 | 2.3 | 0.0 |
| mRNA VEGF-A | 100.0 | 83.0 | 19.6 | 1.3 | 0.0 | 0.0 |
| (3 μg) MC3 | | | | | | |

### Example 15

### Quantification of Human Wound Healing Polypeptide in Pig Skin

[1040] Citrate saline compositions and nanoparticle compositions comprising a VEGF-A modified RNA and either Compound II or DLain-MC3-DMA (MC3) were prepared as in Example 13. The citrate saline composition, Compound II nanoparticle composition, and MC3 nanoparticle composition were all prepared with VEGF-A modified RNA having the sequence of SEQ ID NO: 5.

[1041] Wound preparation: The stratum corneum of the skin of Gottingen mini pigs was removed with a scalpel blade, and the rest of the epidermis was removed by using a Cotech mini grinder.

[1042] Topical administration of a nanoparticle composition comprising a modified VEGF-A RNA and MC3: 40 μl containing 3 μg of mRNA in the MC3 nanoparticle formulation was applied on three areas where the epidermis was removed from the skin of the pigs. The tissue was removed 5-6 hours after application, snap frozen in liquid nitrogen, and stored at −80° C. until the time the analysis was performed. The procedure was repeated on four pigs.

[1043] Intradermal injection of a nanoparticle composition comprising a modified VEGF-A RNA and MC3: 40 μl containing 3 μg of mRNA in the MC3 nanoparticle formulation was administered by intradermal injection (using an insulin syringe) into three sites where the epidermis was removed from the skin of the pigs. The tissue was removed 5-6 hours after application, snap frozen in liquid nitrogen, and stored at −80° C. until the time the analysis was performed. The procedure was repeated on four pigs.

[1044] Topical administration of a nanoparticle composition comprising a VEGF-A RNA and Compound II: 50 μl containing 3 μg of mRNA in the Compound II nanoparticle formulation was applied on three areas where the epidermis was removed from the skin of the pigs. The tissue was removed 5 hours after application, snap frozen in liquid nitrogen, and stored at −80° C. until the time the analysis was performed. The procedure was repeated on five pigs.

[1045] Topical administration of citrate/saline (control): 50 μl containing 100 μg mRNA in the citrate/saline formulation was applied on three areas where the epidermis was removed from the skin of the pigs. The tissue was removed 5 hours after application, snap frozen in liquid nitrogen, and stored at −80° C. until the time analysis was performed. The procedure was repeated on three pigs.

[1046] Each tissue sample was analyzed for expression of human VEGF-A protein using ELISA, and the results summarized in Table 12 (FIG. 5A-B).

TABLE 12

| | Topical 3 μg | | Topical | | Topical | | Single | |
|---|---|---|---|---|---|---|---|---|
| | mRNA | | 100 μg | | 3 μg | | inj 3 μg | |
| | VEGF-A | | mRNA | | mRNA | | mRNA | |
| | formulated | | VEGF-A | | VEGF-A | | VEGF-A | |
| | with | | (Saline/ | | formulated | | formulated | |
| | Compound II | | Citrate) | | with MC3 | | with MC3 | |
| | | pg of | | pg of | | pg of | | pg of |
| | | VEGF- | | VEGF- | | VEGF- | | VEGF- |
| | | A/mg | | A/mg | | A/mg | | A/mg |
| | | skin | | skin | | skin | | skin |
| | pig # | tissue | pig # | tissue | pig # | tissue | pig # | tissue |
| | Pig 1 | 3.64 | Pig 1 | 0.00 | Pig 1 | 0.00 | Pig 1 | 11.62 |
| | Pig 1 | 0.69 | Pig 1 | 0.00 | Pig 1 | 5.22 | Pig 1 | 8.49 |
| | Pig 2 | 5.08 | Pig 1 | 0.00 | Pig 1 | 0.30 | Pig 1 | 5.15 |
| | Pig 2 | 0.00 | Pig 2 | 0.00 | Pig 2 | 14.36 | Pig 2 | 20.35 |
| | Pig 2 | 0.00 | Pig 2 | 0.00 | Pig 2 | 3.04 | Pig 2 | 15.56 |
| | Pig 3 | 0.96 | Pig 2 | 0.00 | Pig 2 | 38.49 | Pig 2 | 34.49 |
| | Pig 3 | 1.95 | Pig 3 | 0.00 | Pig 3 | 0.16 | Pig 3 | 10.44 |
| | Pig 3 | 6.02 | Pig 3 | 0.00 | pig 3 | 12.91 | Pig 3 | 8.43 |
| | Pig 4 | 0.56 | Pig 3 | 0.00 | pig 3 | 19.92 | Pig 3 | 5.12 |
| | Pig 4 | 1.69 | | | Pig 4 | 0.00 | Pig 4 | 8.90 |
| | Pig 4 | 1.09 | | | Pig 4 | 0.00 | Pig 4 | 7.30 |
| | Pig 5 | 0.57 | | | Pig 4 | 0.00 | Pig 4 | 12.59 |
| | Pig 5 | 0.00 | | | | | | |
| | Pig 5 | 1.96 | | | | | | |
| Mean | | 1.73 | | 0.00 | | 7.87 | | 12.37 |
| SEM | | 0.51 | | 0.00 | | 3.42 | | 2.37 |
| # of | | 5 | | 3 | | 4 | | 4 |
| animals | | | | | | | | |

[1047] FIG. 5A shows the production of human VEGF-A protein (hVEGF-A) in pig tissue 5-6 hours after topical application and single injection treatments with the modified VEGF-A RNA formulated in an MC3 LNP, and the production of hVEGF-A protein in pig tissue 5 hours after topical application treatment with the modified VEGF-A RNA formulated with a Compound II LNP. Treatment with the citrate saline composition did not result in the production of hVEGF-A protein. FIG. 5B depicts a wound on pig skin, with the drawn circles indicating the sites of topical treatment with modified VEGF-A RNA formulated in MC3.

[1048] It is to be appreciated that the Detailed Description section, and not the Summary and Abstract sections, is intended to be used to interpret the claims. The Summary and Abstract sections can set forth one or more but not all exemplary embodiments of the present invention as contemplated by the inventor(s), and thus, are not intended to limit the present invention and the appended claims in any way.

[1049] The present invention has been described above with the aid of functional building blocks illustrating the implementation of specified functions and relationships thereof. The boundaries of these functional building blocks have been arbitrarily defined herein for the convenience of the description. Alternate boundaries can be defined so long as the specified functions and relationships thereof are appropriately performed.

[1050] The foregoing description of the specific embodiments will so fully reveal the general nature of the invention that others can, by applying knowledge within the skill of the art, readily modify and/or adapt for various applications such specific embodiments, without undue experimentation, without departing from the general concept of the present invention. Therefore, such adaptations and modifications are intended to be within the meaning and range of equivalents of the disclosed embodiments, based on the teaching and guidance presented herein. It is to be understood that the phraseology or terminology herein is for the purpose of description and not of limitation, such that the terminology or phraseology of the present specification is to be interpreted by the skilled artisan in light of the teachings and guidance.

[1051] The breadth and scope of the present invention should not be limited by any of the above-described exemplary embodiments, but should be defined only in accordance with the following claims and their equivalents.

[1052] All publications, patent applications, patents, and other references mentioned herein are incorporated by reference in their entirety. In case of conflict, the present specification, including definitions, will control.

The application's sequence listing, which the Patent Office published only in electronic form, follows.

SEQUENCE LISTING (273 sequences)

SEQ ID NO: 1 - RNA, 845 nt, Artificial Sequence
  source: /note="Description of Artificial Sequence: Synthetic polynucleotide"
ggggaaauaagagagaaaagaagaguaagaagaaauauaagagccaccaugaacuuucugcugucuugggugcauuggagccuugccuugcugcucuaccuccaccaugccaaguggucccaggcugcacccauggcagaaggaggagggcagaaucaucacgaaguggugaaguucauggaugucuaucagcgcagcuacugccauccaaucgagacccugguggacaucuuccaggaguacccugaugagaucgaguacaucuucaagccauccugugugccccugaugcgaugcgggggcugcugcaaugacgagggccuggagugugugcccacugaggaguccaacaucaccaugcagauuaugcggaucaaaccucaccaaggccagcacauaggagagaugagcuuccuacagcacaacaaaugugaaugcagaccaaagaaagauagagcaagacaagaaaaucccugugggccuugcucagagcggagaaagcauuuguuuguacaagauccgcagacguguaaauguuccugcaaaaacacagacucgcguugcaaggcgaggcagcuugaguuaaacgaacguacuugcagaugugacaagccgaggcggugauaauaggcuggagccucgguggccaugcuucuugccccuugggccuccccccagccccuccuccccuuccugcacccguacccccguggucuuugaauaaagucugagugggcggcaaaaaaaaaaaaaaaaaaaaaaaaaaaaaaaaaaaaaaaaaaaaaaaaaaaaaaaaaaaaaaaaaaaaaaaaaaaaaaaaaaaaaaaaaaaaaaaaaaaaucuag

SEQ ID NO: 2 - RNA, 846 nt, Artificial Sequence
  source: /note="Description of Artificial Sequence: Synthetic polynucleotide"
ggaggaaauaagagagaaaagaagaguaagaagaaauauaagagccaccaugaacuuucugcugucuugggugcauuggagccuugccuugcugcucuaccuccaccaugccaaguggucccaggcugcacccauggcagaaggaggagggcagaaucaucacgaaguggugaaguucauggaugucuaucagcgcagcuacugccauccaaucgagacccugguggacaucuuccaggaguacccugaugagaucgaguacaucuucaagccauccugugugccccugaugcgaugcgggggcugcugcaaugacgagggccuggagugugugcccacugaggaguccaacaucaccaugcagauuaugcggaucaaaccucaccaaggccagcacauaggagagaugagcuuccuacagcacaacaaaugugaaugcagaccaaagaaagauagagcaagacaagaaaaucccugugggccuugcucagagcggagaaagcauuuguuuguacaagauccgcagacguguaaauguuccugcaaaaacacagacucgcguugcaaggcgaggcagcuugaguuaaacgaacguacuugcagaugugacaagccgaggcggugauaauaggcuggagccucgguggccaugcuucuugccccuugggccuccccccagccccuccuccccuuccugcacccguacccccguggucuuugaauaaagucugagugggcggcaaaaaaaaaaaaaaaaaaaaaaaaaaaaaaaaaaaaaaaaaaaaaaaaaaaaaaaaaaaaaaaaaaaaaaaaaaaaaaaaaaaaaaaaaaaaaaaaaaaaucuag

SEQ ID NO: 3 - RNA, 47 nt, Artificial Sequence
  source: /note="Description of Artificial Sequence: Synthetic oligonucleotide"
gggaaauaagagagaaaagaagaguaagaagaaauauaagagccacc

SEQ ID NO: 4 - RNA, 142 nt, Artificial Sequence
  source: /note="Description of Artificial Sequence: Synthetic polynucleotide"
ugauaauaggcuggagccucgguggccuagcuucuugccccuugggccuccccccagccccuccuccccuuccugcacccguacccccuccauaaaguaggaaacacuacaguggucuuugaauaaagucugagugggcggc

SEQ ID NO: 5 - RNA, 845 nt, Artificial Sequence
  source: /note="Description of Artificial Sequence: Synthetic polynucleotide"
ggggaaauaagagagaaaagaagaguaagaagaaauauaagagccaccaugaacuuucuccuuucuugggugcauuggagccuugccuuguuacucuaccuccaccacgccaaguggucccaggccgcacccauggcagaaggaggagggcagaaucaucacgaaguggugaaguucauggacgucuaucagcgcagcuacugccauccaaucgagacacugguggacaucuuccaggaguacccugaugagaucgaguacaucuucaagccauccugugugccccugaugcgaugcggcggcugcugcaaugacgagggccuggagugugugccuacugaggaguccaacaucaccaugcagauuaugcggaucaaaccucaccaaggccagcacauaggagagaugagcuuccuacagcacaacaaaugugaaugcagaccaaagaaagauagagcaagacaagagaaucccugugggccuugcucagagcggagaaagcauuuguuuguacaagauccgcagacguguaaauguuccugcaagaacacagacucgcguugcaaggcgaggcagcuugaguuaaacgaacguacuugcagaugugacaagccgaggcggugauaauaggcuggagccucgguggccaugcuucuugccccuugggccuccccccagccccuccuccccuuccugcacccguacccccguggucuuugaauaaagucugagugggcggcaaaaaaaaaaaaaaaaaaaaaaaaaaaaaaaaaaaaaaaaaaaaaaaaaaaaaaaaaaaaaaaaaaaaaaaaaaaaaaaaaaaaaaaaaaaaaaaaaaaaucuag

SEQ ID NO: 6 - RNA, 845 nt, Artificial Sequence
  source: /note="Description of Artificial Sequence: Synthetic polynucleotide"
gaggaaauaagagagaaaagaagaguaagaagaaauauaagagccaccaugaacuuucugcugucuugggugcauuggagccuugccuugcugcucuaccuccaccaugccaaguggucccaggcugcacccauggcagaaggaggagggcagaaucaucacgaaguggugaaguucauggaugucuaucagcgcagcuacugccauccaaucgagacccugguggacaucuuccaggaguacccugaugagaucgaguacaucuucaagccauccugugugccccugaugcgaugcgggggcugcugcaaugacgagggccuggagugugugcccacugaggaguccaacaucaccaugcagauuaugcggaucaaaccucaccaaggccagcacauaggagagaugagcuuccuacagcacaacaaaugugaaugcagaccaaagaaagauagagcaagacaagaaaaucccugugggccuugcucagagcggagaaagcauuuguuuguacaagauccgcagacguguaaauguuccugcaaaaacacagacucgcguugcaaggcgaggcagcuugaguuaaacgaacguacuugcagaugugacaagccgaggcggugauaauaggcuggagccucgguggccaugcuucuugccccuugggccuccccccagccccuccuccccuuccugcacccguacccccguggucuuugaauaaagucugagugggcggcaaaaaaaaaaaaaaaaaaaaaaaaaaaaaaaaaaaaaaaaaaaaaaaaaaaaaaaaaaaaaaaaaaaaaaaaaaaaaaaaaaaaaaaaaaaaaaaaaaaaucuag

SEQ ID NO: 7 - RNA, 840 nt, Artificial Sequence
  source: /note="Description of Artificial Sequence: Synthetic polynucleotide"
ggggaaauaagagagaaaagaagaguaagaagaaauauaagagccaccacgaacuuugugcucucuugggugcauuggagccuugccuugcugcucuaccuccaccacgccaaguggucccaggccgcacccacggcagaaggaggagggcagaaucaucacgaaguggugaaguucacggacgucuaucagcgcagcuacugccauccaaucgagacccucguggacaucuuccaggaguacccucacgagaucgaguacaucuucaagccauccugugugccccugacgcgacgcgggggcugcugcaacgacgagggccucgagugugugcccaccgaggaguccaacaccaccacgcagauuacgcggaucaaaccucaccaaggccagcacauaggagagacgagcuuccuacagcacaacaaacgugaacgcagaccaaagaaagauagagcaagacaagaaaaucccugugggccuugcucagagcggagaaagcauuuguuuguacaagauccgcagacguguaaacguuccugcaaaaacacagacucgcguugcaaggcgaggcagcuugaguuaaacgaacguacuugcagacgugacaagccgaggcggugauaauagguuggagccucgguggccacgcuucuugccccuugggccuccccccagccccuccuccccuuccugcacccguacccccguggucuuugaauaaagucugagugggcggcaaaaaaaaaaaaaaaaaaaaaaaaaaaaaaaaaaaaaaaaaaaaaaaaaaaaaaaaaaaaaaaaaaaaaaaaaaaaaaaaaaaaaaaaaaaaaaaaaaaa

SEQ ID NO: 8 - protein, 4 aa, Artificial Sequence
  source: /note="Description of Artificial Sequence: Synthetic peptide"
GGGS

SEQ ID NO: 9 - protein, 252 aa, Homo sapiens
MRAPLLPPAPVVLSLLILGSGHYAAGLDLNDTYSGKREPFSGDHSADGFEVTSRSEMSSGSEISPVSEMPSSSEPSSGADYDYSEEYDNEPQIPGYIVDDSVRVEQVVKPPQNKTESENTSDKPKRKKKGGKNGKNRRNRKKKNPCNAEFQNFCIHGECKYIEHLEAVTCKCQQEYFGERCGEKSMKTHSMIDSSLSKIALAAIAAFMSAVILTAVAVITVQLRRQYVRKYEGEAEERKKLRQENGNVHAIA

SEQ ID NO: 10 - protein, 349 aa, Homo sapiens
MTAASMGPVRVAFVVLLALCSRPAVGQNCSGPCRCPDEPAPRCPAGVSLVLDGCGCCRVCAKQLGELCTERDPCDPHKGLFCDFGSPANRKIGVCTAKDGAPCIFGGTVYRSGESFQSSCKYQCTCLDGAVGCMPLCSMDVRLPSPDCPFPRRVKLPGKCCEEWVCDEPKDQTVVGPALAAYRLEDTFGPDPTMIRANCLVQTTEWSACSKTCGMGISTRVTNDNASCRLEKQSRLCMVRPCEADLEENIKKGKKCIRTPKISKPIKFELSGCTSMKTYRAKFCGVCTDGRCCTPHRTTTLPVEFKCPDGEVMKKNMMFIKTCACHYNCPGDNDIFESLYYRKMYGDMA

SEQ ID NO: 11 - protein, 1207 aa, Homo sapiens
MLLTLIILLPVVSKFSFVSLSAPQHWSCPEGTLAGNGNSTCVGPAPFLIFSHGNSIFRIDTEGTNYEQLVVDAGVSVIMDFHYNEKRIYWVDLERQLLQRVFLNGSRQERVCNIEKNVSGMAINWINEEVIWSNQQEGIITVTDMKGNNSHILLSALKYPANVAVDPVERFIFWSSEVAGSLYRADLDGVGVKALLETSEKITAVSLDVLDKRLFWIQYNREGSNSLICSCDYDGGSVHISKHPTQHNLFAMSLFGDRIFYSTWKMKTIWIANKHTGKDMVRINLHSSFVPLGELKVVHPLAQPKAEDDTWEPEQKLCKLRKGNCSSTVCGQDLQSHLCMCAEGYALSRDRKYCEDVNECAFWNHGCTLGCKNTPGSYYCTCPVGFVLLPDGKRCHQLVSCPRNVSECSHDCVLTSEGPLCFCPEGSVLERDGKTCSGCSSPDNGGCSQLCVPLSPVSWECDCFPGYDLQLDEKSCAASGPQPFLLFANSQDIRHMHFDGTDYGTLLSQQMGMVYALDHDPVENKIYFAHTALKWIERANMDGSQRERLIEEGVDVPEGLAVDWIGRRFYWTDRGKSLIGRSDLNGKRSKIITKENISQPRGIAVHPMAKRLFWTDTGINPRIESSSLQGLGRLVIASSDLIWPSGITIDFLTDKLYWCDAKQSVIEMANLDGSKRRRLTQNDVGHPFAVAVFEDYVWFSDWAMPSVMRVNKRTGKDRVRLQGSMLKPSSLVVVHPLAKPGADPCLYQNGGCEHICKKRLGTAWCSCREGFMKASDGKTCLALDGHQLLAGGEVDLKNQVTPLDILSKTRVSEDNITESQHMLVAEIMVSDQDDCAPVGCSMYARCISEGEDATCQCLKGFAGDGKLCSDIDECEMGVPVCPPASSKCINTEGGYVCRCSEGYQGDGIHCLDIDECQLGEHSCGENASCTNTEGGYTCMCAGRLSEPGLICPDSTPPPHLREDDHHYSVRNSDSECPLSHDGYCLHDGVCMYIEALDKYACNCVVGYIGERCQYRDLKWWELRHAGHGQQQKVIVVAVCVVVLVMLLLLSLWGAHYYRTQKLLSKNPKNPYEESSRDVRSRRPADTEDGMSSCPQPWFVVIKEHQDLKNGGQPVAGEDGQAADGSMQPTSWRQEPQLCGMGTEQGCWIPVSSDKGSCPQVMERSFHMPSYGTQTLEGGVEKPHSLLSANPLWQQRALDPPHQMELTQ

SEQ ID NO: 12 - protein, 154 aa, Homo sapiens
MALGVPISVYLLFNAMTALTEEAAVTVTPPITAQQGNWTVNKTEADNIEGPIALKFSHLCLEDHNSYCINGACAFHHELEKAICRCFTGYTGERCEHLTLTSYAVDSYEKYIAIGIGVGLLLSGFLVIFYCYIRKRCLKLKSPYNVCSGERRPL

SEQ ID NO: 13 - protein, 112 aa, Homo sapiens
MALGVPISVYLLFNAMTALTEEAAVTVTPPITAQQGNWTVNKTEADNIEGPIALKFSHLCLEDHNSYCINGACAFHHELEKAICRCFTGYTGERCLKLKSPYNVCSGERRPL

SEQ ID NO: 14 - protein, 103 aa, Homo sapiens
MALGVPISVYLLFNAMTALTEEAAVTVTPPITAQQADNIEGPIALKFSHLCLEDHNSYCINGACAFHHELEKAICRCFTGYTGERCLKLKSPYNVCSGERRPL

SEQ ID NO: 15 - protein, 103 aa, Homo sapiens
MALGVPISVYLLFNAMTALTEEAAVTVTPPITAQQGNWTVNKTEADNIEGPIALKFSHLCLEDHNSYCINGACAFHHELEKAICRCLKLKSPYNVCSGERRPL

SEQ ID NO: 16 - protein, 94 aa, Homo sapiens
MALGVPISVYLLFNAMTALTEEAAVTVTPPITAQQADNIEGPIALKFSHLCLEDHNSYCINGACAFHHELEKAICRCLKLKSPYNVCSGERRPL

SEQ ID NO: 17 - protein, 169 aa, Homo sapiens
MTAGRRMEMLCAGRVPALLLCLGFHLLQAVLSTTVIPSCIPGESSDNCTALVQTEDNPRVAQVSITKCSSDMNGYCLHGQCIYLVDMSQNYCRCEVGYTGVRCEHFFLTVHQPLSKEYVALTVILIILFLITVVGSTYYFCRWYRNRKSKEPKKEYERVTSGDPELPQV

SEQ ID NO: 18 - protein, 155 aa, Homo sapiens [sequence omitted]

SEQ ID NO: 19 - protein, 288 aa, Homo sapiens
MVGVGGGDVEDVTPRPGGCQISGRGARGCNGIPGAAAWEAALPRRRPRRHPSVNPRSRAAGSPRTRGRRTEERPSGSRLGDRGRGRALPGGRLGGRGRGRAPERVGGRGRGRGTAAPRAAPAARGSRPGPAGTMAAGSITTLPALPEDGGSGAFPPGHFKDPKRLYCKNGGFFLRIHPDGRVDGVREKSDPHIKLQLQAEERGVVSIKGVCANRYLAMKEDGRLLASKCVTDECFFFERLESNNYNTYRSRKYTSWYVALKRTGQYKLGSKTGPGQKAILFLPMSAKS

SEQ ID NO: 20 - protein, 194 aa, Homo sapiens
MHKWILTWILPTLLYRSCFHIICLVGTISLACNDMTPEQMATNVNCSSPERHTRSYDYMEGGDIRVRRLFCRTQWYLRIDKRGKVKGTQEMKNNYNIMEIRTVAVGIVAIKGVESEFYLAMNKEGKLYAKKECNEDCNFKELILENHYNTYASAKWTHNGGEMFVALNQKGIPVRGKKTKKEQKTAHFLPMAIT

SEQ ID NO: 21 - protein, 208 aa, Homo sapiens
MWKWILTHCASAFPHLPGCCCCCFLLLFLVSSVPVTCQALGQDMVSPEATNSSSSSFSSPSSAGRHVRSYNHLQGDVRWRKLFSFTKYFLKIEKNGKVSGTKKENCPYSILEITSVEIGVVAVKAINSNYYLAMNKKGKLYGSKEFNNDCKLKERIEENGYNTYASFNWQHNGRQMYVALNGKGAPRRGQKTRRKNTSAHFLPMVVHS

SEQ ID NO: 22 - protein, 208 aa, Homo sapiens
MKLLPSVVLKLFLAAVLSALVTGESLERLRRGLAAGTSNPDPPTVSTDQLLPLGGGRDRKVRDLQEADLDLLRVTLSSKPQALATPNKEEHGKRKKKGKGLGKKRDPCLRKYKDFCIHGECKYVKELRAPSCICHPGYHGERCHGLSLPVENRLYTYDHTTILAVVAVVLSSVCLLVIVGLLMFRYHRRGGYDVENEEKVKLGMTNSH

SEQ ID NO: 23 - protein, 158 aa, Homo sapiens
MGKISSLPTQLFKCCFCDFLKVKMHTMSSSHLFYLALCLLTFTSSATAGPETLCGAELVDALQFVCGDRGFYFNKPTGYGSSSRRAPQTGIVDECCFRSCDLRRLEMYCAPLKPAKSARSVRAQRHTDMPKTQKYQPPSTNKNTKSQRRKGSTFEERK

SEQ ID NO: 24 - protein, 137 aa, Homo sapiens
MITPTVKMHTMSSSHLFYLALCLLTFTSSATAGPETLCGAELVDALQFVCGDRGFYFNKPTGYGSSSRRAPQTGIVDECCFRSCDLRRLEMYCAPLKPAKSARSVRAQRHTDMPKTQKEVHLKNASRGSAGNKNYRM

SEQ ID NO: 25 - protein, 195 aa, Homo sapiens
MGKISSLPTQLFKCCFCDFLKVKMHTMSSSHLFYLALCLLTFTSSATAGPETLCGAELVDALQFVCGDRGFYFNKPTGYGSSSRRAPQTGIVDECCFRSCDLRRLEMYCAPLKPAKSARSVRAQRHTDMPKTQKYQPPSTNKNTKSQRRKGWPKTHPGGEQKEGTEASLQIRGKKKEQRREIGSRNAECRGKKGK

SEQ ID NO: 26 - protein, 153 aa, Homo sapiens
MGKISSLPTQLFKCCFCDFLKVKMHTMSSSHLFYLALCLLTFTSSATAGPETLCGAELVDALQFVCGDRGFYFNKPTGYGSSSRRAPQTGIVDECCFRSCDLRRLEMYCAPLKPAKSARSVRAQRHTDMPKTQKEVHLKNASRGSAGNKNYRM

SEQ ID NO: 27 - protein, 180 aa, Homo sapiens
MGIPMGKSMLVLLTFLAFASCCIAAYRPSETLCGGELVDTLQFVCGDRGFYFSRPASRVSRRSRGIVEECCFRSCDLALLETYCATPAKSERDVSTPPTVLPDNFPRYPVGKFFQYDTWKQSTQRLRRGLPALLRARRGHVLAKELEAFREAKRHRPLIALPTQDPAHGGAPPEMASNRK

SEQ ID NO: 28 - protein, 236 aa, Homo sapiens
MVSPDPQIIVVAPETELASMQVQRTEDGVTIIQIFWVGRKGELLRRTPVSSAMQTPMGIPMGKSMLVLLTFLAFASCCIAAYRPSETLCGGELVDTLQFVCGDRGFYFSRPASRVSRRSRGIVEECCFRSCDLALLETYCATPAKSERDVSTPPTVLPDNFPRYPVGKFFQYDTWKQSTQRLRRGLPALLRARRGHVLAKELEAFREAKRHRPLIALPTQDPAHGGAPPEMASNRK

SEQ ID NO: 29 - protein, 382 aa, Homo sapiens
MCVVAYCKTKKQRKKLHDRLRQSLRSERNNMMNIANGPHHPNPPPENVQLVNQYVSKNVISSEHIVEREAETSFSTSHYTSTAHHSTTVTQTPSHSWSNGHTESILSESHSVIVMSSVENSRHSSPTGGPRGRLNGTGGPRECNSFLRHARETPDSYRDSPHSERYVSAMTTPARMSPVDFHTPSSPKSPPSEMSPPVSSMTVSMPSMAVSPFMEEERPLLLVTPPRLREKKFDHHPQQFSSFHHNPAHDSNSLPASPLRIVEDEEYETTQEYEPAQEPVKKLANSRRAKRTKPNGHIANRLEVDSNTSSQSSNSESETEDERVGEDTPFLGIQNPLAASLEATPAFRLADSRTNPAGRFSTQEEIQARLSSVIANQDPIAV

SEQ ID NO: 30 - protein, 640 aa, Homo sapiens
MSERKEGRGKGKGKKKERGSGKKPESAAGSQSPALPPRLKEMKSQESAAGSKLVLRCETSSEYSSLRFKWFKNGNELNRKNKPQNIKIQKKPGKSELRINKASLADSGEYMCKVISKLGNDSASANITIVESNEIITGMPASTEGAYVSSESPIRISVSTEGANTSSSTSTSTTGTSHLVKCAEKEKTFCVNGGECFMVKDLSNPSRYLCKCQPGFTGARCTENVPMKVQNQEKAEELYQKRVLTITGICIALLVVGIMCVVAYCKTKKQRKKLHDRLRQSLRSERNNMMNIANGPHHPNPPPENVQLVNQYVSKNVISSEHIVEREAETSFSTSHYTSTAHHSTTVTQTPSHSWSNGHTESILSESHSVIVMSSVENSRHSSPTGGPRGRLNGTGGPRECNSFLRHARETPDSYRDSPHSERYVSAMTTPARMSPVDFHTPSSPKSPPSEMSPPVSSMTVSMPSMAVSPFMEEERPLLLVTPPRLREKKFDHHPQQFSSFHHNPAHDSNSLPASPLRIVEDEEYETTQEYEPAQEPVKKLANSRRAKRTKPNGHIANRLEVDSNTSSQSSNSESETEDERVGEDTPFLGIQNPLAASLEATPAFRLADSRTNPAGRFSTQEEIQARLSSVIANQDPIAV

SEQ ID NO: 31 - protein, 382 aa, Homo sapiens; identical to SEQ ID NO: 29

SEQ ID NO: 32 - protein, 422 aa, Homo sapiens
MRWRRAPRRSGRPGPRAQRPGSAARSSPPLPLLPLLLLLGTAALAPGAAAGNEAAPAGASVCYSSPPSVGSVQELAQRAAVVIEGKVHPQRRQQGALDRKAAAAAGEAGAWGGDREPPAAGPRALGPPAEEPLLAANGTVPSWPTAPVPSAGEPGEEAPYLVKVHQVWAVKAGGLKKDSLLTVRLGTWGHPAFPSCGRLKEDSRYIFFMEPDANSTSRAPAAFRASFPPLETGRNLKKEVSRVLCKRCALPPRLKEMKSQESAAGSKLVLRCETSSEYSSLRFKWFKNGNELNRKNKPQNIKIQKKPGKSELRINKASLADSGEYMCKVISKLGNDSASANITIVESNATSTSTTGTSHLVKCAEKEKTFCVNGGECFMVKDLSNPSRYLCKCPNEFTGDRCQNYVMASFYSTSTPFLSLPE

SEQ ID NO: 33 - protein, 645 aa, Homo sapiens
MSERKEGRGKGKGKKKERGSGKKPESAAGSQSPALPPRLKEMKSQESAAGSKLVLRCETSSEYSSLRFKWFKNGNELNRKNKPQNIKIQKKPGKSELRINKASLADSGEYMCKVISKLGNDSASANITIVESNEIITGMPASTEGAYVSSESPIRISVSTEGANTSSSTSTSTTGTSHLVKCAEKEKTFCVNGGECFMVKDLSNPSRYLCKCPNEFTGDRCQNYVMASFYKHLGIEFMEAEELYQKRVLTITGICIALLVVGIMCVVAYCKTKKQRKKLHDRLRQSLRSERNNMMNIANGPHHPNPPPENVQLVNQYVSKNVISSEHIVEREAETSFSTSHYTSTAHHSTTVTQTPSHSWSNGHTESILSESHSVIVMSSVENSRHSSPTGGPRGRLNGTGGPRECNSFLRHARETPDSYRDSPHSERYVSAMTTPARMSPVDFHTPSSPKSPPSEMSPPVSSMTVSMPSMAVSPFMEEERPLLLVTPPRLREKKFDHHPQQFSSFHHNPAHDSNSLPASPLRIVEDEEYETTQEYEPAQEPVKKLANSRRAKRTKPNGHIANRLEVDSNTSSQSSNSESETEDERVGEDTPFLGIQNPLAASLEATPAFRLADSRTNPAGRFSTQEEIQARLSSVIANQDPIAV

SEQ ID NO: 34 - protein, 624 aa, Homo sapiens
MGKGRAGRVGTTALPPRLKEMKSQESAAGSKLVLRCETSSEYSSLRFKWFKNGNELNRKNKPQNIKIQKKPGKSELRINKASLADSGEYMCKVISKLGNDSASANITIVESNEIITGMPASTEGAYVSSESPIRISVSTEGANTSSSTSTSTTGTSHLVKCAEKEKTFCVNGGECFMVKDLSNPSRYLCKCPNEFTGDRCQNYVMASFYKHLGIEFMEAEELYQKRVLTITGICIALLVVGIMCVVAYCKTKKQRKKLHDRLRQSLRSERNNMMNIANGPHHPNPPPENVQLVNQYVSKNVISSEHIVEREAETSFSTSHYTSTAHHSTTVTQTPSHSWSNGHTESILSESHSVIVMSSVENSRHSSPTGGPRGRLNGTGGPRECNSFLRHARETPDSYRDSPHSERYVSAMTTPARMSPVDFHTPSSPKSPPSEMSPPVSSMTVSMPSMAVSPFMEEERPLLLVTPPRLREKKFDHHPQQFSSFHHNPAHDSNSLPASPLRIVEDEEYETTQEYEPAQEPVKKLANSRRAKRTKPNGHIANRLEVDSNTSSQSSNSESETEDERVGEDTPFLGIQNPLAASLEATPAFRLADSRTNPAGRFSTQEEIQARLSSVIANQDPIAV

SEQ ID NO: 35 - protein, 607 aa, Homo sapiens
MGKGRAGRVGTTALPPRLKEMKSQESAAGSKLVLRCETSSEYSSLRFKWFKNGNELNRKNKPQNIKIQKKPGKSELRINKASLADSGEYMCKVISKLGNDSASANITIVESNEIITGMPASTEGAYVSSATSTSTTGTSHLVKCAEKEKTFCVNGGECFMVKDLSNPSRYLCKCPNEFTGDRCQNYVMASFYKHLGIEFMEAEELYQKRVLTITGICIALLVVGIMCVVAYCKTKKQRKKLHDRLRQSLRSERNNMMNIANGPHHPNPPPENVQLVNQYVSKNVISSEHIVEREAETSFSTSHYTSTAHHSTTVTQTPSHSWSNGHTESILSESHSVIVMSSVENSRHSSPTGGPRGRLNGTGGPRECNSFLRHARETPDSYRDSPHSERYVSAMTTPARMSPVDFHTPSSPKSPPSEMSPPVSSMTVSMPSMAVSPFMEEERPLLLVTPPRLREKKFDHHPQQFSSFHHNPAHDSNSLPASPLRIVEDEEYETTQEYEPAQEPVKKLANSRRAKRTKPNGHIANRLEVDSNTSSQSSNSESETEDERVGEDTPFLGIQNPLAASLEATPAFRLADSRTNPAGRFSTQEEIQARLSSVIANQDPIAV

SEQ ID NO: 36 - protein, 590 aa, Homo sapiens
MGKGRAGRVGTTALPPRLKEMKSQESAAGSKLVLRCETSSEYSSLRFKWFKNGNELNRKNKPQNIKIQKKPGKSELRINKASLADSGEYMCKVISKLGNDSASANITIVESNATSTSTTGTSHLVKCAEKEKTFCVNGGECFMVKDLSNPSRYLCKCPNEFTGDRCQNYVMASFYKHLGIEFMEAEELYQKRVLTITGICIALLVVGIMCVVAYCKTKKQRKKLHDRLRQSLRSERNNMMNIANGPHHPNPPPENVQLVNQYVSKNVISSEHIVEREAETSFSTSHYTSTAHHSTTVTQTPSHSWSNGHTESILSESHSVIVMSSVENSRHSSPTGGPRGRLNGTGGPRECNSFLRHARETPDSYRDSPHSERYVSAMTTPARMSPVDFHTPSSPKSPPSEMSPPVSSMTVSMPSMAVSPFMEEERPLLLVTPPRLREKKFDHHPQQFSSFHHNPAHDSNSLPASPLRIVEDEEYETTQEYEPAQEPVKKLANSRRAKRTKPNGHIANRLEVDSNTSSQSSNSESETEDERVGEDTPFLGIQNPLAASLEATPAFRLADSRTNPAGRFSTQEEIQARLSSVIANQDPIAV

SEQ ID NO: 37 - protein, 637 aa, Homo sapiens
MSERKEGRGKGKGKKKERGSGKKPESAAGSQSPALPPRLKEMKSQESAAGSKLVLRCETSSEYSSLRFKWFKNGNELNRKNKPQNIKIQKKPGKSELRINKASLADSGEYMCKVISKLGNDSASANITIVESNEIITGMPASTEGAYVSSESPIRISVSTEGANTSSSTSTSTTGTSHLVKCAEKEKTFCVNGGECFMVKDLSNPSRYLCKCPNEFTGDRCQNYVMASFYKAEELYQKRVLTITGICIALLVVGIMCVVAYCKTKKQRKKLHDRLRQSLRSERNNMMNIANGPHHPNPPPENVQLVNQYVSKNVISSEHIVEREAETSFSTSHYTSTAHHSTTVTQTPSHSWSNGHTESILSESHSVIVMSSVENSRHSSPTGGPRGRLNGTGGPRECNSFLRHARETPDSYRDSPHSERYVSAMTTPARMSPVDFHTPSSPKSPPSEMSPPVSSMTVSMPSMAVSPFMEEERPLLLVTPPRLREKKFDHHPQQFSSFHHNPAHDSNSLPASPLRIVEDEEYETTQEYEPAQEPVKKLANSRRAKRTKPNGHIANRLEVDSNTSSQSSNSESETEDERVGEDTPFLGIQNPLAASLEATPAFRLADSRTNPAGRFSTQEEIQARLSSVIANQDPIAV

SEQ ID NO: 38 - protein, 420 aa, Homo sapiens
MSERKEGRGKGKGKKKERGSGKKPESAAGSQSPALPPRLKEMKSQESAAGSKLVLRCETSSEYSSLRFKWFKNGNELNRKNKPQNIKIQKKPGKSELRINKASLADSGEYMCKVISKLGNDSASANITIVESNEIITGMPASTEGAYVSSESPIRISVSTEGANTSSSTSTSTTGTSHLVKCAEKEKTFCVNGGECFMVKDLSNPSRYLCKCPNEFTGDRCQNYVMASFYKAEELYQKRVLTITGICIALLVVGIMCVVAYCKTKKQRKKLHDRLRQSLRSERNNMMNIANGPHHPNPPPENVQLVNQYVSKNVISSEHIVEREAETSFSTSHYTSTAHHSTTVTQTPSHSWSNGHTESILSESHSVIVMSSVENSRHSSPTGGPRGRLNGTGGPRECNSFLRHARETPDSYRDSPHSER

SEQ ID NO: 39 - RNA, 57 nt, Artificial Sequence
  source: /note="Description of Artificial Sequence: Synthetic oligonucleotide"
gggaaauaagagagaaaagaagaguaagaagaaauauaagaccccggcgccgccacc

SEQ ID NO: 40 - RNA, 54 nt, Artificial Sequence
  source: /note="Description of Artificial Sequence: Synthetic oligonucleotide"
gggaaauaagagagaaaagaagaguaagaagaaauauaagaccccggcgccacc

SEQ ID NO: 41 - RNA, 6 nt, Artificial Sequence
  source: /note="Description of Artificial Sequence: Synthetic oligonucleotide"
gccrcc

SEQ ID NO: 42 - RNA, 6 nt, Artificial Sequence
  source: /note="Description of Artificial Sequence: Synthetic oligonucleotide"
gccgcc

SEQ ID NO: 43 - RNA, 10 nt, Artificial Sequence
  source: /note="Description of Artificial Sequence: Synthetic oligonucleotide"
ccccggcgcc

SEQ ID NO: 44 - RNA, 7 nt, Artificial Sequence
  source: /note="Description of Artificial Sequence: Synthetic oligonucleotide"
ccccggc

SEQ ID NO: 45 - protein, 241 aa, Homo sapiens
MSERKEGRGKGKGKKKERGSGKKPESAAGSQSPALPPRLKEMKSQESAAGSKLVLRCETSSEYSSLRFKWFKNGNELNRKNKPQNIKIQKKPGKSELRINKASLADSGEYMCKVISKLGNDSASANITIVESNEIITGMPASTEGAYVSSESPIRISVSTEGANTSSSTSTSTTGTSHLVKCAEKEKTFCVNGGECFMVKDLSNPSRYLCKCPNEFTGDRCQNYVMASFYSTSTPFLSLPE

SEQ ID NO: 46 - protein, 207 aa, Homo sapiens
MSERKEGRGKGKGKKKERGSGKKPESAAGSQSPALPPRLKEMKSQESAAGSKLVLRCETSSEYSSLRFKWFKNGNELNRKNKPQNIKIQKKPGKSELRINKASLADSGEYMCKVISKLGNDSASANITIVESNATSTSTTGTSHLVKCAEKEKTFCVNGGECFMVKDLSNPSRYLCKCPNEFTGDRCQNYVMASFYSTSTPFLSLPE

SEQ ID NO: 47 - protein, 211 aa, Homo sapiens
MSERKEGRGKGKGKKKERGSGKKPESAAGSQSPALPPRLKEMKSQESAAGSKLVLRCETSSEYSSLRFKWFKNGNELNRKNKPQNIKIQKKPGKSELRINKASLADSGEYMCKVISKLGNDSASANITIVESNEIITGMPASTEGAYVSSESPIRISVSTEGANTSSSTSTSTTGTSHLVKCAEKEKTFCVNGGECFMVKDLSNPSRYLCK

SEQ ID NO: 48 - protein, 194 aa, Homo sapiens
MSERKEGRGKGKGKKKERGSGKKPESAAGSQSPALPPRLKEMKSQESAAGSKLVLRCETSSEYSSLRFKWFKNGNELNRKNKPQNIKIQKKPGKSELRINKASLADSGEYMCKVISKLGNDSASANITIVESNEIITGMPASTEGAYVSSATSTSTTGTSHLVKCAEKEKTFCVNGGECFMVKDLSNPSRYLCK

SEQ ID NO: 49 - protein, 177 aa, Homo sapiens
MSERKEGRGKGKGKKKERGSGKKPESAAGSQSPALPPRLKEMKSQESAAGSKLVLRCETSSEYSSLRFKWFKNGNELNRKNKPQNIKIQKKPGKSELRINKASLADSGEYMCKVISKLGNDSASANITIVESNATSTSTTGTSHLVKCAEKEKTFCVNGGECFMVKDLSNPSRYLCK

SEQ ID NO: 50 - protein, 522 aa, Homo sapiens
MEIYSPDMSEVAAERSSSPSTQLSADPSLDGLPAAEDMPEPQTEDGRTPGLVGLAVPCCACLEAERLRGCLNSEKICIVPILACLVSLCLCIAGLKWVFVDKIFEYDSPTHLDPGGLGQDPIISLDATAASAVWVSSEAYTSPVSRAQSESEVQVTVQGDKAVVSFEPSAAPTPKNRIFAFSFLPSTAPSFPSPTRNPEVRTPKSATQPQTTETNLQTAPKLSTSTSTTGTSHLVKCAEKEKTFCVNGGECFMVKDLSNPSRYLCKCPNEFTGDRCQNYVMASFYKHLGIEFMEAEELYQKRVLTITGICIALLVVGIMCVVAYCKTKKQRKKLHDRLRQSLRSERNNMMNIANGPHHPNPPPENVQLVNQYVSKNVISSEHIVEREAETSFSTSHYTSTAHHSTTVTQTPSHSWSNGHTESILSESHSVIVMSSVENSRHSSPTGGPRGRLNGTGGPRECNSFLRHARETPDSYRDSPHSERHNLIAELRRNKAHRSKCMQIQLSATHLRSSSIPHLGFIL

SEQ ID NO: 51 - protein, 483 aa, Homo sapiens
MEIYSPDMSEVAAERSSSPSTQLSADPSLDGLPAAEDMPEPQTEDGRTPGLVGLAVPCCACLEAERLRGCLNSEKICIVPILACLVSLCLCIAGLKWVFVDKIFEYDSPTHLDPGGLGQDPIISLDATAASAVWVSSEAYTSPVSRAQSESEVQVTVQGDKAVVSFEPSAAPTPKNRIFAFSFLPSTAPSFPSPTRNPEVRTPKSATQPQTTETNLQTAPKLSTSTSTTGTSHLVKCAEKEKTFCVNGGECFMVKDLSNPSRYLCKCPNEFTGDRCQNYVMASFYKHLGIEFMEAEELYQKRVLTITGICIALLVVGIMCVVAYCKTKKQRKKLHDRLRQSLRSERNNMMNIANGPHHPNPPPENVQLVNQYVSKNVISSEHIVEREAETSFSTSHYTSTAHHSTTVTQTPSHSWSNGHTESILSESHSVIVMSSVENSRHSSPTGGPRGRLNGTGGPRECNSFLRHARETPDSYRDSPHSER

SEQ ID NO: 52 - protein, 700 aa, Homo sapiens
MEIYSPDMSEVAAERSSSPSTQLSADPSLDGLPAAEDMPEPQTEDGRTPGLVGLAVPCCACLEAERLRGCLNSEKICIVPILACLVSLCLCIAGLKWVFVDKIFEYDSPTHLDPGGLGQDPIISLDATAASAVWVSSEAYTSPVSRAQSESEVQVTVQGDKAVVSFEPSAAPTPKNRIFAFSFLPSTAPSFPSPTRNPEVRTPKSATQPQTTETNLQTAPKLSTSTSTTGTSHLVKCAEKEKTFCVNGGECFMVKDLSNPSRYLCKCPNEFTGDRCQNYVMASFYKHLGIEFMEAEELYQKRVLTITGICIALLVVGIMCVVAYCKTKKQRKKLHDRLRQSLRSERNNMMNIANGPHHPNPPPENVQLVNQYVSKNVISSEHIVEREAETSFSTSHYTSTAHHSTTVTQTPSHSWSNGHTESILSESHSVIVMSSVENSRHSSPTGGPRGRLNGTGGPRECNSFLRHARETPDSYRDSPHSERYVSAMTTPARMSPVDFHTPSSPKSPPSEMSPPVSSMTVSMPSMAVSPFMEEERPLLLVTPPRLREKKFDHHPQQFSSFHHNPAHDSNSLPASPLRIVEDEEYETTQEYEPAQEPVKKLANSRRAKRTKPNGHIANRLEVDSNTSSQSSNSESETEDERVGEDTPFLGIQNPLAASLEATPAFRLADSRTNPAGRFSTQEEIQARLSSVIANQDPIAV

SEQ ID NO: 53 - protein, 462 aa, Homo sapiens
MSERKEGRGKGKGKKKERGSGKKPESAAGSQSPALPPRLKEMKSQESAAGSKLVLRCETSSEYSSLRFKWFKNGNELNRKNKPQNIKIQKKPGKSELRINKASLADSGEYMCKVISKLGNDSASANITIVESNEIITGMPASTEGAYVSSESPIRISVSTEGANTSSSTSTSTTGTSHLVKCAEKEKTFCVNGGECFMVKDLSNPSRYLCKCQPGFTGARCTENVPMKVQNQEKAEELYQKRVLTITGICIALLVVGIMCVVAYCKTKKQRKKLHDRLRQSLRSERNNMMNIANGPHHPNPPPENVQLVNQYVSKNVISSEHIVEREAETSFSTSHYTSTAHHSTTVTQTPSHSWSNGHTESILSESHSVIVMSSVENSRHSSPTGGPRGRLNGTGGPRECNSFLRHARETPDSYRDSPHSERHNLIAELRRNKAHRSKCMQIQLSATHLRSSSIPHLGFIL

SEQ ID NO: 54 - protein, 459 aa, Homo sapiens
MSERKEGRGKGKGKKKERGSGKKPESAAGSQSPALPPRLKEMKSQESAAGSKLVLRCETSSEYSSLRFKWFKNGNELNRKNKPQNIKIQKKPGKSELRINKASLADSGEYMCKVISKLGNDSASANITIVESNEIITGMPASTEGAYVSSESPIRISVSTEGANTSSSTSTSTTGTSHLVKCAEKEKTFCVNGGECFMVKDLSNPSRYLCKCPNEFTGDRCQNYVMASFYKAEELYQKRVLTITGICIALLVVGIMCVVAYCKTKKQRKKLHDRLRQSLRSERNNMMNIANGPHHPNPPPENVQLVNQYVSKNVISSEHIVEREAETSFSTSHYTSTAHHSTTVTQTPSHSWSNGHTESILSESHSVIVMSSVENSRHSSPTGGPRGRLNGTGGPRECNSFLRHARETPDSYRDSPHSERHNLIAELRRNKAHRSKCMQIQLSATHLRSSSIPHLGFIL

SEQ ID NO: 55 - protein, 308 aa, Homo sapiens
MQIPKHISIEDITATSTSTTGTSHLVKCAEKEKTFCVNGGECFMVKDLSNPSRYLCKCQPGFTGARCTENVPMKVQNQEKAEELYQKRVLTITGICIALLVVGIMCVVAYCKTKKQRKKLHDRLRQSLRSERNNMMNIANGPHHPNPPPENVQLVNQYVSKNVISSEHIVEREAETSFSTSHYTSTAHHSTTVTQTPSHSWSNGHTESILSESHSVIVMSSVENSRHSSPTGGPRGRLNGTGGPRECNSFLRHARETPDSYRDSPHSERHNLIAELRRNKAHRSKCMQIQLSATHLRSSSIPHLGFIL

SEQ ID NO: 56 - protein, 296 aa, Homo sapiens
MEIYSPDMSEVAAERSSSPSTQLSADPSLDGLPAAEDMPEPQTEDGRTPGLVGLAVPCCACLEAERLRGCLNSEKICIVPILACLVSLCLCIAGLKWVFVDKIFEYDSPTHLDPGGLGQDPIISLDATAASAVWVSSEAYTSPVSRAQSESEVQVTVQGDKAVVSFEPSAAPTPKNRIFAFSFLPSTAPSFPSPTRNPEVRTPKSATQPQTTETNLQTAPKLSTSTSTTGTSHLVKCAEKEKTFCVNGGECFMVKDLSNPSRYLCKCPNEFTGDRCQNYVMASFYSTSTPFLSLPE

SEQ ID NO: 57 - protein, 483 aa, Homo sapiens
MQIPKHISIEDITATSTSTTGTSHLVKCAEKEKTFCVNGGECFMVKDLSNPSRYLCKCPNEFTGDRCQNYVMASFYKAEELYQKRVLTITGICIALLVVGIMCVVAYCKTKKQRKKLHDRLRQSLRSERNNMMNIANGPHHPNPPPENVQLVNQYVSKNVISSEHIVEREAETSFSTSHYTSTAHHSTTVTQTPSHSWSNGHTESILSESHSVIVMSSVENSRHSSPTGGPRGRLNGTGGPRECNSFLRHARETPDSYRDSPHSERYVSAMTTPARMSPVDFHTPSSPKSPPSEMSPPVSSMTVSMPSMAVSPFMEEERPLLLVTPPRLREKKFDHHPQQFSSFHHNPAHDSNSLPASPLRIVEDEEYETTQEYEPAQEPVKKLANSRRAKRTKPNGHIANRLEVDSNTSSQSSNSESETEDERVGEDTPFLGIQNPLAASLEATPAFRLADSRTNPAGRFSTQEEIQARLSSVIANQDPIAV

SEQ ID NO: 58 - protein, 170 aa, Homo sapiens
MPVMRLFPCFLQLLAGLALPAVPPQQWALSAGNGSSEVEVVPFQEVWGRSYCRALERLVDVVSEYPSEVEHMFSPSCVSLLRCTGCCGDENLHCVPVETANVTMQLLKIRSGDRPSYVELTFSQHVRCECRPLREKMKPERRRPKGRGKRRREKQRPTDCHLCGDAVPRR

SEQ ID NO: 59 - protein, 149 aa, Homo sapiens
MPVMRLFPCFLQLLAGLALPAVPPQQWALSAGNGSSEVEVVPFQEVWGRSYCRALERLVDVVSEYPSEVEHMFSPSCVSLLRCTGCCGDENLHCVPVETANVTMQLLKIRSGDRPSYVELTFSQHVRCECRPLREKMKPERCGDAVPRR

SEQ ID NO: 60 - protein, 169 aa, Homo sapiens
MPVMRLFPCFLQLLAGLALPAVPPQWALSAGNGSSEVEVVPFQEVWGRSYCRALERLVDVVSEYPSEVEHMFSPSCVSLLRCTGCCGDENLHCVPVETANVTMQLLKIRSGDRPSYVELTFSQHVRCECRPLREKMKPERRRPKGRGKRRREKQRPTDCHLCGDAVPRR

SEQ ID NO: 61 - protein, 1089 aa, Homo sapiens
MGTSHPAFLVLGCLLTGLSLILCQLSLPSILPNENEKVVQLNSSFSLRCFGESEVSWQYPMSEEESSDVEIRNEENNSGLFVTVLEVSSASAAHTGLYTCYYNHTQTEENELEGRHIYIYVPDPDVAFVPLGMTDYLVIVEDDDSAIIPCRTTDPETPVTLHNSEGVVPASYDSRQGFNGTFTVGPYICEATVKGKKFQTIPFNVYALKATSELDLEMEALKTVYKSGETIVVTCAVFNNEVVDLQWTYPGEVKGKGITMLEEIKVPSIKLVYTLTVPEATVKDSGDYECAARQATREVKEMKKVTISVHEKGFIEIKPTFSQLEAVNLHEVKHFVVEVRAYPPPRISWLKNNLTLIENLTEITTDVEKIQEIRYRSKLKLIRAKEEDSGHYTIVAQNEDAVKSYTFELLTQVPSSILDLVDDHHGSTGGQTVRCTAEGTPLPDIEWMICKDIKKCNNETSWTILANNVSNIITEIHSRDRSTVEGRVTFAKVEETIAVRCLAKNLLGAENRELKLVAPTLRSELTVAAAVLVLLVIVIISLIVLVVIWKQKPRYEIRWRVIESISPDGHEYIYVDPMQLPYDSRWEFPRDGLVLGRVLGSGAFGKVVEGTAYGLSRSQPVMKVAVKMLKPTARSSEKQALMSELKIMTHLGPHLNIVNLLGACTKSGPIYIITEYCFYGDLVNYLHKNRDSFLSHHPEKPKKELDIFGLNPADESTRSYVILSFENNGDYMDMKQADTTQYVPMLERKEVSKYSDIQRSLYDRPASYKKKSMLDSEVKNLLSDDNSEGLTLLDLLSFTYQVARGMEFLASKNCVHRDLAARNVLLAQGKIVKICDFGLARDIMHDSNYVSKGSTFLPVKWMAPESIFDNLYTTLSDVWSYGILLWEIFSLGGTPYPGMMVDSTFYNKIKSGYRMAKPDHATSEVYEIMVKCWNSEPEKRPSFYHLSEIVENLLPGQYKKSYEKIHLDFLKSDHPAVARMRVDSDNAYIGVTYKNEEDKLKDWEGGLDEQRLSADSGYIIPLPDIDPVPEEEDLGKRNRHSSQTSEESAIETGSSSSTFIKREDETIEDIDMMDDIGIDSSDLVEDSFL

SEQ ID NO: 62 - protein, 807 aa, Homo sapiens
MGTSHPAFLVLGCLLTGLSLILCQLSLPSILPNENEKVVQLNSSFSLRCFGESEVSWQYPMSEEESSDVEIRNEENNSGLFVTVLEVSSASAAHTGLYTCYYNHTQTEENELEGRHIYIYVPDPDVAFVPLGMTDYLVIVEDDDSAIIPCRTTDPETPVTLHNSEGVVPASYDSRQGFNGTFTVGPYICEATVKGKKFQTIPFNVYALKATSELDLEMEALKTVYKSGETIVVTCAVFNNEVVDLQWTYPGEVKGKGITMLEEIKVPSIKLVYTLTVPEATVKDSGDYECAARQATREVKEMKKVTISVHEKGFIEIKPTFSQLEAVNLHEVKHFVVEVRAYPPPRISWLKNNLTLIENLTEITTDVEKIQEIRYRSKLKLIRAKEEDSGHYTIVAQNEDAVKSYTFELLTQVPSSILDLVDDHHGSTGGQTVRCTAEGTPLPDIEWMICKDIKKCNNETSWTILANNVSNIITEIHSRDRSTVEGRVTFAKVEETIAVRCLAKNLLGAENRELKLVAPTLRSELTVAAAVLVLLVIVIISLIVLVVIWKQKPRYEIRWRVIESISPDGHEYIYVDPMQLPYDSRWEFPRDGLVLGRVLGSGAFGKVVEGTAYGLSRSQPVMKVAVKMLKPTARSSEKQALMSELKIMTHLGPHLNIVNLLGACTKSGPIYIITEYCFYGDLVNYLHKNRDSFLSHHPEKPKKELDIFGLNPADESTRSYVILSFENNGDYMDMKQADTTQYVPMLERKEVSKYSDIQRSLYDRPASYKKKSMLGWAGGVGTRCQRNLSHAQAQALLAGRPLLSGLP

SEQ ID NO: 63 - protein, 1114 aa, Homo sapiens
MLPRLVLNSWAQMICLPQLPKFPRAMGTSHPAFLVLGCLLTGLSLILCQLSLPSILPNENEKVVQLNSSFSLRCFGESEVSWQYPMSEEESSDVEIRNEENNSGLFVTVLEVSSASAAHTGLYTCYYNHTQTEENELEGRHIYIYVPDPDVAFVPLGMTDYLVIVEDDDSAIIPCRTTDPETPVTLHNSEGVVPASYDSRQGFNGTFTVGPYICEATVKGKKFQTIPFNVYALKATSELDLEMEALKTVYKSGETIVVTCAVFNNEVVDLQWTYPGEVKGKGITMLEEIKVPSIKLVYTLTVPEATVKDSGDYECAARQATREVKEMKKVTISVHEKGFIEIKPTFSQLEAVNLHEVKHFVVEVRAYPPPRISWLKNNLTLIENLTEITTDVEKIQEIRYRSKLKLIRAKEEDSGHYTIVAQNEDAVKSYTFELLTQVPSSILDLVDDHHGSTGGQTVRCTAEGTPLPDIEWMICKDIKKCNNETSWTILANNVSNIITEIHSRDRSTVEGRVTFAKVEETIAVRCLAKNLLGAENRELKLVAPTLRSELTVAAAVLVLLVIVIISLIVLVVIWKQKPRYEIRWRVIESISPDGHEYIYVDPMQLPYDSRWEFPRDGLVLGRVLGSGAFGKVVEGTAYGLSRSQPVMKVAVKMLKPTARSSEKQALMSELKIMTHLGPHLNIVNLLGACTKSGPIYIITEYCFYGDLVNYLHKNRDSFLSHHPEKPKKELDIFGLNPADESTRSYVILSFENNGDYMDMKQADTTQYVPMLERKEVSKYSDIQRSLYDRPASYKKKSMLDSEVKNLLSDDNSEGLTLLDLLSFTYQVARGMEFLASKNCVHRDLAARNVLLAQGKIVKICDFGLARDIMHDSNYVSKGSTFLPVKWMAPESIFDNLYTTLSDVWSYGILLWEIFSLGGTPYPGMMVDSTFYNKIKSGYRMAKPDHATSEVYEIMVKCWNSEPEKRPSFYHLSEIVENLLPGQYKKSYEKIHLDFLKSDHPAVARMRVDSDNAYIGVTYKNEEDKLKDWEGGLDEQRLSADSGYIIPLPDIDPVPEEEDLGKRNRHSSQTSEESAIETGSSSSTFIKREDETIEDIDMMDDIGIDSSDLVEDSFL

SEQ ID NO: 64 - protein, 1102 aa, Homo sapiens
MGFAETIRKFPRAMGTSHPAFLVLGCLLTGLSLILCQLSLPSILPNENEKVVQLNSSFSLRCFGESEVSWQYPMSEEESSDVEIRNEENNSGLFVTVLEVSSASAAHTGLYTCYYNHTQTEENELEGRHIYIYVPDPDVAFVPLGMTDYLVIVEDDDSAIIPCRTTDPETPVTLHNSEGVVPASYDSRQGFNGTFTVGPYICEATVKGKKFQTIPFNVYALKATSELDLEMEALKTVYKSGETIVVTCAVFNNEVVDLQWTYPGEVKGKGITMLEEIKVPSIKLVYTLTVPEATVKDSGDYECAARQATREVKEMKKVTISVHEKGFIEIKPTFSQLEAVNLHEVKHFVVEVRAYPPPRISWLKNNLTLIENLTEITTDVEKIQEIRYRSKLKLIRAKEEDSGHYTIVAQNEDAVKSYTFELLTQVPSSILDLVDDHHGSTGGQTVRCTAEGTPLPDIEWMICKDIKKCNNETSWTILANNVSNIITEIHSRDRSTVEGRVTFAKVEETIAVRCLAKNLLGAENRELKLVAPTLRSELTVAAAVLVLLVIVIISLIVLVVIWKQKPRYEIRWRVIESISPDGHEYIYVDPMQLPYDSRWEFPRDGLVLGRVLGSGAFGKVVEGTAYGLSRSQPVMKVAVKMLKPTARSSEKQALMSELKIMTHLGPHLNIVNLLGACTKSGPIYIITEYCFYGDLVNYLHKNRDSFLSHHPEKPKKELDIFGLNPADESTRSYVILSFENNGDYMDMKQADTTQYVPMLERKEVSKYSDIQRSLYDRPASYKKKSMLDSEVKNLLSDDNSEGLTLLDLLSFTYQVARGMEFLASKNCVHRDLAARNVLLAQGKIVKICDFGLARDIMHDSNYVSKGSTFLPVKWMAPESIFDNLYTTLSDVWSYGILLWEIFSLGGTPYPGMMVDSTFYNKIKSGYRMAKPDHATSEVYEIMVKCWNSEPEKRPSFYHLSEIVENLLPGQYKKSYEKIHLDFLKSDHPAVARMRVDSDNAYIGVTYKNEEDKLKDWEGGLDEQRLSADSGYIIPLPDIDPVPEEEDLGKRNRHSSQTSEESAIETGSSSSTFIKREDETIEDIDMMDDIGIDSSDLVEDSFL

SEQ ID NO: 65 - protein, 241 aa, Homo sapiens
MNRCWALFLSLCCYLRLVSAEGDPIPEELYEMLSDHSIRSFDDLQRLLHGDPGEEDGAELDLNMTRSHSGGELESLARGRRSLGSLTIAEPAMIAECKTRTEVFEISRRLIDRTNANFLVWPPCVEVQRCSGCCNNRNVQCRPTQVQLRPVQVRKIEIVRKKPIFKKATVTLEDHLACKCETVAAARPVTRSPGGSQEQRAKTPQTRVTIRTVRVRRPPKGKHRKFKHTHDKTALKETLGA

SEQ ID NO: 66 - protein, 226 aa, Homo sapiens
MFIMGLGDPIPEELYEMLSDHSIRSFDDLQRLLHGDPGEEDGAELDLNMTRSHSGGELESLARGRRSLGSLTIAEPAMIAECKTRTEVFEISRRLIDRTNANFLVWPPCVEVQRCSGCCNNRNVQCRPTQVQLRPVQVRKIEIVRKKPIFKKATVTLEDHLACKCETVAAARPVTRSPGGSQEQRAKTPQTRVTIRTVRVRRPPKGKHRKFKHTHDKTALKETLGA

SEQ ID NO: 67 - protein, 160 aa, Homo sapiens
MVPSAGQLALFALGIVLAACQALENSTSPLSADPPVAAAVVSHFNDCPDSHTQFCFHGTCRFLVQEDKPACVCHSGYVGARCEHADLLAVVAASQKKQAITALVVVSIVALAVLIITCVLIHCCQVRKHCEWCRALICRHEKPSALLKGRTACCHSETVV

SEQ ID NO: 68 - protein, 159 aa, Homo sapiens
MVPSAGQLALFALGIVLAACQALENSTSPLSDPPVAAAVVSHFNDCPDSHTQFCFHGTCRFLVQEDKPACVCHSGYVGARCEHADLLAVVAASQKKQAITALVVVSIVALAVLIITCVLIHCCQVRKHCEWCRALICRHEKPSALLKGRTACCHSETVV

SEQ ID NO: 69 - protein, 165 aa, Homo sapiens
MFKIGRGALDLFSELLSFGGIVLAACQALENSTSPLSADPPVAAAVVSHFNDCPDSHTQFCFHGTCRFLVQEDKPACVCHSGYVGARCEHADLLAVVAASQKKQAITALVVVSIVALAVLIITCVLIHCCQVRKHCEWCRALICRHEKPSALLKGRTACCHSETV

SEQ ID NO: 70 - protein, 165 aa, Homo sapiens
MFKIGRGALDLFSELLSFGGIVLAACQALENSTSPLSDPPVAAAVVSHFNDCPDSHTQFCFHGTCRFLVQEDKPACVCHSGYVGARCEHADLLAVVAASQKKQAITALVVVSIVALAVLIITCVLIHCCQVRKHCEWCRALICRHEKPSALLKGRTACCHSETVV

SEQ ID NO: 71 - protein, 390 aa, Homo sapiens
MPPSGLRLLPLLLPLLWLLVLTPGRPAAGLSTCKTIDMELVKRKRIEAIRGQILSKLRLASPPSQGEVPPGPLPEAVLALYNSTRDRVAGESAEPEPEPEADYYAKEVTRVLMVETHNEIYDKFKQSTHSIYMFFNTSELREAVPEPVLLSRAELRLLRLKLKVEQHVELYQKYSNNSWRYLSNRLLAPSDSPEWLSFDVTGVVRQWLSRGGEIEGFRLSAHCSCDSRDNTLQVDINGFTTGRRGDLATIHGMNRPFLLLMATPLERAQHLQSSRHRRALDTNYCFSSTEKNCCVRQLYIDFRKDLGWKWIHEPKGYHANFCLGPCPYIWSLDTQYSKVLALYNQHNPGASAAPCCVPQALEPLPIVYYVGRKPKVEQLSNMIVRSCKCS

SEQ ID NO: 72 - protein, 442 aa, Homo sapiens
MHYCVLSAFLILHLVTVALSLSTCSTLDMDQFMRKRIEAIRGQILSKLKLTSPPEDYPEPEEVPPEVISIYNSTRDLLQEKASRRAAACERERSDEEYYAKEVYKIDMPPFFPSETVCPVVTTPSGSVGSLCSRQSQVLCGYLDAIPPTFYRPYFRIVRFDVSAMEKNASNLVKAEFRVFRLQNPKARVPEQRIELYQILKSKDLTSPTQRYIDSKVVKTRAEGEWLSFDVTDAVHEWLHHKDRNLGFKISLHCPCCTFVPSNNYIIPNKSEELEARFAGIDGTSTYTSGDQKTIKSTRKKNSGKTPHLLLMLLPSYRLESQQTNRRKKRALDAAYCFRNVQDNCCLRPLYIDFKRDLGWKWIHEPKGYNANFCAGACPYLWSSDTQHSRVLSLYNTINPEASASPCCVSQDLEPLTILYYIGKTPKIEQLSNMIVKSCKCS

SEQ ID NO: 73 - protein, 414 aa, Homo sapiens
MHYCVLSAFLILHLVTVALSLSTCSTLDMDQFMRKRIEAIRGQILSKLKLTSPPEDYPEPEEVPPEVISIYNSTRDLLQEKASRRAAACERERSDEEYYAKEVYKIDMPPFFPSENAIPPTFYRPYFRIVRFDVSAMEKNASNLVKAEFRVFRLQNPKARVPEQRIELYQILKSKDLTSPTQRYIDSKVVKTRAEGEWLSFDVTDAVHEWLHHKDRNLGFKISLHCPCCTFVPSNNYIIPNKSEELEARFAGIDGTSTYTSGDQKTIKSTRKKNSGKTPHLLLMLLPSYRLESQQTNRRKKRALDAAYCFRNVQDNCCLRPLYIDFKRDLGWKWIHEPKGYNANFCAGACPYLWSSDTQHSRVLSLYNTINPEASASPCCVSQDLEPLTILYYIGKTPKIEQLSNMIVKSCKCS

SEQ ID NO: 74 - protein, 419 aa, Homo sapiens
MHLLGFFSVACSLLAAALLPGPREAPAAAAAFESGLDLSDAEPDAGEATAYASKDLEEQLRSVSSVDELMTVLYPEYWKMYKCQLRKGGWQHNREQANLNSRTEETIKFAAAHYNTEILKSIDNEWRKTQCMPREVCIDVGKEFGVATNTFFKPPCVSVYRCGGCCNSEGLQCMNTSTSYLSKTLFEITVPLSQGPKPVTISFANHTSCRCMSKLDVYRQVHSIIRRSLPATLPQCQAANKTCPTNYMWNNHICRCLAQEDFMFSSDAGDDSTDGFHDICGPNKELDEETCQCVCRAGLRPASCGPHKELDRNSCQCVCKNKLFPSQCGANREFDENTCQCVCKRTCPRNQPLNPGKCACECTESPQKCLLKGKKFHHQTCSCYRRPCTNRQKACEPGFSYSEEVCRCVPSYWKRPQMS

SEQ ID NO: 75 - protein, 132 aa, Homo sapiens
MKSSGLFPFLVLLALGTLAPWAVEGSGKSFKAGVCPPKKSAQCLRYKKPECQSDWQCPGKKRCCPDTCGIKCLDPVDTPNPTRRKPGKCPVTYGQCLMLNPPNFCEMDGQCKRDLKCCMGMCGKSCVSPVKA

SEQ ID NO: 76 - protein, 207 aa, Homo sapiens
MAGPATQSPMKLMALQLLLWHSALWTVQEATPLGPASSLPQSFLLKCLEQVRKIQGDGAALQEKLVSECATYKLCHPEELVLLGHSLGIPWAPLSSCPSQALQLAGCLSQLHSGLFLYQGLLQALEGISPELGPTLDTLQLDVADFATTIWQQMEELGMAPALQPTQGAMPAFASAFQRRAGGVLVASHLQSFLEVSYRVLRHLAQP

SEQ ID NO: 77 - protein, 204 aa, Homo sapiens
MAGPATQSPMKLMALQLLLWHSALWTVQEATPLGPASSLPQSFLLKCLEQVRKIQGDGAALQEKLCATYKLCHPEELVLLGHSLGIPWAPLSSCPSQALQLAGCLSQLHSGLFLYQGLLQALEGISPELGPTLDTLQLDVADFATTIWQQMEELGMAPALQPTQGAMPAFASAFQRRAGGVLVASHLQSFLEVSYRVLRHLAQP

SEQ ID NO: 78 - protein, 171 aa, Homo sapiens
MAGPATQSPMKLMALQLLLWHSALWTVQEATPLGPASSLPQSFLLKCLEQVRKIQGDGAALQEKLVSEAGCLSQLHSGLFLYQGLLQALEGISPELGPTLDTLQLDVADFATTIWQQMEELGMAPALQPTQGAMPAFASAFQRRAGGVLVASHLQSFLEVSYRVLRHLAQP

SEQ ID NO: 79 - protein, 168 aa, Homo sapiens
MAGPATQSPMKLMALQLLLWHSALWTVQEATPLGPASSLPQSFLLKCLEQVRKIQGDGAALQEKLAGCLSQLHSGLFLYQGLLQALEGISPELGPTLDTLQLDVADFATTIWQQMEELGMAPALQPTQGAMPAFASAFQRRAGGVLVASHLQSFLEVSYRVLRHLAQP

SEQ ID NO: 80 - protein, 144 aa, Homo sapiens
MWLQSLLLLGTVACSISAPARSPSPSTQPWEHVNAIQEARRLLNLSRDTAAEMNETVEVISEMFDLQEPTCLQTRLELYKQGLRGSLTKLKGPLTMMASHYKQHCPPTPETSCATQIITFESFKENLKDFLLVIPFDCWEPVQE

SEQ ID NO: 81 - protein, 728 aa, Homo sapiens
MWVTKLLPALLLQHVLLHLLLLPIAIPYAEGQRKRRNTIHEFKKSAKTTLIKIDPALKIKTKKVNTADQCANRCTRNKGLPFTCKAFVFDKARKQCLWFPFNSMSSGVKKEFGHEFDLYENKDYIRNCIIGKGRSYKGTVSITKSGIKCQPWSSMIPHEHSFLPSSYRGKDLQENYCRNPRGEEGGPWCFTSNPEVRYEVCDIPQCSEVECMTCNGESYRGLMDHTESGKICQRWDHQTPHRHKFLPERYPDKGFDDNYCRNPDGQPRPWCYTLDPHTRWEYCAIKTCADNTMNDTDVPLETTECIQGQGEGYRGTVNTIWNGIPCQRWDSQYPHEHDMTPENFKCKDLRENYCRNPDGSESPWCFTTDPNIRVGYCSQIPNCDMSHGQDCYRGNGKNYMGNLSQTRSGLTCSMWDKNMEDLHRHIFWEPDASKLNENYCRNPDDDAHGPWCYTGNPLIPWDYCPISRCEGDTTPTIVNLDHPVISCAKTKQLRVVNGIPTRTNIGWMVSLRYRNKHICGGSLIKESWVLTARQCFPSRDLKDYEAWLGIHDVHGRGDEKCKQVLNVSQLVYGPEGSDLVLMKLARPAVLDDFVSTIDLPNYGCTIPEKTSCSVYGWGYTGLINYDGLLRVAHLYIMGNEKCSQHHRGKVTLNESEICAGAEKIGSGPCEGDYGGPLVCEQHKMRMVLGVIVPGRGCAIPNRPGIFVRVAYYAKWIHKIILTYKVPQS

SEQ ID NO: 82 - protein, 290 aa, Homo sapiens
MWVTKLLPALLLQHVLLHLLLLPIAIPYAEGQRKRRNTIHEFKKSAKTTLIKIDPALKIKTKKVNTADQCANRCTRNKGLPFTCKAFVFDKARKQCLWFPFNSMSSGVKKEFGHEFDLYENKDYIRNCIIGKGRSYKGTVSITKSGIKCQPWSSMIPHEHSFLPSSYRGKDLQENYCRNPRGEEGGPWCFTSNPEVRYEVCDIPQCSEVECMTCNGESYRGLMDHTESGKICQRWDHQTPHRHKFLPERYPDKGFDDNYCRNPDGQPRPWCYTLDPHTRWEYCAIKTCET

SEQ ID NO: 83 - protein, 723 aa, Homo sapiens
MWVTKLLPALLLQHVLLHLLLLPIAIPYAEGQRKRRNTIHEFKKSAKTTLIKIDPALKIKTKKVNTADQCANRCTRNKGLPFTCKAFVFDKARKQCLWFPFNSMSSGVKKEFGHEFDLYENKDYIRNCIIGKGRSYKGTVSITKSGIKCQPWSSMIPHEHSYRGKDLQENYCRNPRGEEGGPWCFTSNPEVRYEVCDIPQCSEVECMTCNGESYRGLMDHTESGKICQRWDHQTPHRHKFLPERYPDKGFDDNYCRNPDGQPRPWCYTLDPHTRWEYCAIKTCADNTMNDTDVPLETTECIQGQGEGYRGTVNTIWNGIPCQRWDSQYPHEHDMTPENFKCKDLRENYCRNPDGSESPWCFTTDPNIRVGYCSQIPNCDMSHGQDCYRGNGKNYMGNLSQTRSGLTCSMWDKNMEDLHRHIFWEPDASKLNENYCRNPDDDAHGPWCYTGNPLIPWDYCPISRCEGDTTPTIVNLDHPVISCAKTKQLRVVNGIPTRTNIGWMVSLRYRNKHICGGSLIKESWVLTARQCFPSRDLKDYEAWLGIHDVHGRGDEKCKQVLNVSQLVYGPEGSDLVLMKLARPAVLDDFVSTIDLPNYGCTIPEKTSCSVYGWGYTGLINYDGLLRVAHLYIMGNEKCSQHHRGKVTLNESEICAGAEKIGSGPCEGDYGGPLVCEQHKMRMVLGVIVPGRGCAIPNRPGIFVRVAYYAKWIHKIILTYKVPQS

SEQ ID NO: 84 - protein, 285 aa, Homo sapiens
MWVTKLLPALLLQHVLLHLLLLPIAIPYAEGQRKRRNTIHEFKKSAKTTLIKIDPALKIKTKKVNTADQCANRCTRNKGLPFTCKAFVFDKARKQCLWFPFNSMSSGVKKEFGHEFDLYENKDYIRNCIIGKGRSYKGTVSITKSGIKCQPWSSMIPHEHSYRGKDLQENYCRNPRGEEGGPWCFTSNPEVRYEVCDIPQCSEVECMTCNGESYRGLMDHTESGKICQRWDHQTPHRHKFLPERYPDKGFDDNYCRNPDGQPRPWCYTLDPHTRWEYCAIKTCET

SEQ ID NO: 85 - RNA, 41 nt, Artificial Sequence
  source: /note="Description of Artificial Sequence: Synthetic oligonucleotide"
gggaaauaagagagaaaagaagaguaagaagaaauauaaga

SEQ ID NO: 86 - protein, 5 aa, Artificial Sequence
  source: /note="Description of Artificial Sequence: Synthetic peptide"
GGGGS

SEQ ID NO: 87 - RNA, 9 nt, Artificial Sequence
  source: /note="Description of Artificial Sequence: Synthetic oligonucleotide"
ccrccaugg

SEQ ID NO: 88 - RNA, 92 nt, Artificial Sequence
  source: /note="Description of Artificial Sequence: Synthetic oligonucleotide"
ucaagcuuuuggacccucguacagaagcuaauacgacucacuauagggaaauaagagagaaaagaagaguaagaagaaauauaagagccacc

SEQ ID NO: 89 - RNA, 47 nt, Artificial Sequence
  source: /note="Description of Artificial Sequence: Synthetic oligonucleotide"
gggagaucagagagaaaagaagaguaagaagaaauauaagagccacc

SEQ ID NO: 90 - RNA, 42 nt, Artificial Sequence
  source: /note="Description of Artificial Sequence: Synthetic oligonucleotide"
gggagacaagcuuggcauuccgguacuguugguaaagccacc

SEQ ID NO: 91 - RNA, 47 nt, Artificial Sequence; identical to SEQ ID NO: 89
  source: /note="Description of Artificial Sequence: Synthetic oligonucleotide"

SEQ ID NO: 92 - RNA, 42 nt, Artificial Sequence; identical to SEQ ID NO: 90
  source: /note="Description of Artificial Sequence: Synthetic oligonucleotide"

SEQ ID NO: 93 - RNA, 47 nt, Artificial Sequence
  source: /note="Description of Artificial Sequence: Synthetic oligonucleotide"
gggaauuaacagagaaaagaagaguaagaagaaauauaagagccacc

SEQ ID NO: 94 - RNA, 47 nt, Artificial Sequence
  source: /note="Description of Artificial Sequence: Synthetic oligonucleotide"
gggaaauuagacagaaaagaagaguaagaagaaauauaagagccacc

SEQ ID NO: 95 - RNA, 47 nt, Artificial Sequence
  source: /note="Description of Artificial Sequence: Synthetic oligonucleotide"
gggaaauaagagaguaaagaacaguaagaagaaauauaagagccacc

SEQ ID NO: 96 - RNA, 47 nt, Artificial Sequence
  source: /note="Description of Artificial Sequence: Synthetic oligonucleotide"
gggaaaaaagagagaaaagaagacuaagaagaaauauaagagccacc

SEQ ID NO: 97 - RNA, 47 nt, Artificial Sequence
  source: /note="Description of Artificial Sequence: Synthetic oligonucleotide"
gggaaauaagagagaaaagaagaguaagaagauauauaagagccacc

SEQ ID NO: 98 - RNA, 47 nt, Artificial Sequence
  source: /note="Description of Artificial Sequence: Synthetic oligonucleotide"
gggaaauaagagacaaaacaagaguaagaagaaauauaagagccacc

SEQ ID NO: 99 - RNA, 47 nt, Artificial Sequence
  source: /note="Description of Artificial Sequence: Synthetic oligonucleotide"
gggaaauuagagaguaaagaacaguaaguagaauuaaaagagccacc

SEQ ID NO: 100 - RNA, 47 nt, Artificial Sequence
  source: /note="Description of Artificial Sequence: Synthetic oligonucleotide"
gggaaauaagagagaauagaagaguaagaagaaauauaagagccacc

SEQ ID NO: 101 - RNA, 47 nt, Artificial Sequence
  source: /note="Description of Artificial Sequence: Synthetic oligonucleotide"
gggaaauaagagagaaaagaagaguaagaagaaaauuaagagccacc

SEQ ID NO: 102 - RNA, 47 nt, Artificial Sequence
  source: /note="Description of Artificial Sequence: Synthetic oligonucleotide"
gggaaauaagagagaaaagaagaguaagaagaaauuuaagagccacc

SEQ ID NO: 103 - skipped

SEQ ID NO: 104 - RNA, 142 nt, Artificial Sequence
  source: /note="Description of Artificial Sequence: Synthetic polynucleotide"
ugauaauaguccauaaaguaggaaacacuacagcuggagccucgguggccaugcuucuugccccuugggccuccccccagccccuccuccccuuccugcacccguacccccguggucuuugaauaaagucugagugggcggc

SEQ ID NO: 105 - RNA, 142 nt, Artificial Sequence
  source: /note="Description of Artificial Sequence: Synthetic polynucleotide"
ugauaauaggcuggagccucgguggcuccauaaaguaggaaacacuacacaugcuucuugccccuugggccuccccccagccccuccuccccuuccugcacccguacccccguggucuuugaauaaagucugagugggcggc

SEQ ID NO: 106 - RNA, 142 nt, Artificial Sequence
  source: /note="Description of Artificial Sequence: Synthetic polynucleotide"
ugauaauaggcuggagccucgguggccaugcuucuugccccuuccauaaaguaggaaacacuacaugggccuccccccagccccuccuccccuuccugcacccguacccccguggucuuugaauaaagucugagugggcggc

SEQ ID NO: 107 - RNA, 142 nt, Artificial Sequence
  source: /note="Description of Artificial Sequence: Synthetic polynucleotide"
ugauaauaggcuggagccucgguggccaugcuucuugccccuugggccuccccccaguccauaaaguaggaaacacuacaccccuccuccccuuccugcacccguacccccguggucuuugaauaaagucugagugggcggc

SEQ ID NO: 108 - RNA, 142 nt, Artificial Sequence
  source: /note="Description of Artificial Sequence: Synthetic polynucleotide"
ugauaauaggcuggagccucgguggccaugcuucuugccccuugggccuccccccagccccuccuccccuucuccauaaaguaggaaacacuacacugcacccguacccccguggucuuugaauaaagucugagugggcggc

SEQ ID NO: 109 - RNA, 142 nt, Artificial Sequence
  source: /note="Description of Artificial Sequence: Synthetic polynucleotide"
ugauaauaggcuggagccucgguggccaugcuucuugccccuugggccuccccccagccccuccuccccuuccugcacccguacccccuccauaaaguaggaaacacuacaguggucuuugaauaaagucugagugggcggc

SEQ ID NO: 110 - RNA, 142 nt, Artificial Sequence
  source: /note="Description of Artificial Sequence: Synthetic polynucleotide"
ugauaauaggcuggagccucgguggccaugcuucuugccccuugggccuccccccagccccuccuccccuuccugcacccguacccccguggucuuugaauaaaguuccauaaaguaggaaacacuacacugagugggcggc

SEQ ID NO: 111 - RNA, 164 nt, Artificial Sequence
  source: /note="Description of Artificial Sequence: Synthetic polynucleotide"
ugauaauaguccauaaaguaggaaacacuacagcuggagccucgguggccaugcuucuugccccuugggccuccccccagccccuccuccccuuccugcacccguaccccccgcauuauuacucacgguacgaguggucuuugaauaaagucugagugggcggc

SEQ ID NO: 112 - RNA, 164 nt, Artificial Sequence
  source: /note="Description of Artificial Sequence: Synthetic polynucleotide"
ugauaauaguccauaaaguaggaaacacuacagcuggagccucgguggccuagcuucuugccccuugggccuccccccagccccuccuccccuuccugcacccguaccccccgcauuauuacucacgguacgaguggucuuugaauaaagucugagugggcggc

SEQ ID NO: 113 - skipped

SEQ ID NO: 114 - RNA, 87 nt, Artificial Sequence
  source: /note="Description of Artificial Sequence: Synthetic oligonucleotide"
gacagugcagucacccauaaaguagaaagcacuacuaacagcacuggaggguguaguguuuccuacuuuauggaugaguguacugug

SEQ ID NO: 115 - RNA, 23 nt, Artificial Sequence
  source: /note="Description of Artificial Sequence: Synthetic oligonucleotide"
uguaguguuuccuacuuuaugga

SEQ ID NO: 116 - RNA, 23 nt, Artificial Sequence
  source: /note="Description of Artificial Sequence: Synthetic oligonucleotide"
uccauaaaguaggaaacacuaca

SEQ ID NO: 117 - RNA, 21 nt, Artificial Sequence
  source: /note="Description of Artificial Sequence: Synthetic oligonucleotide"
cauaaaguagaaagcacuacu

SEQ ID NO: 118 - RNA, 21 nt, Artificial Sequence
  source: /note="Description of Artificial Sequence: Synthetic oligonucleotide"
aguagugcuuucuacuuuaug

SEQ ID NO: 119 - RNA, 85 nt, Artificial Sequence
  source: /note="Description of Artificial Sequence: Synthetic oligonucleotide"
cgcuggcgacgggacauuauuacuuuugguacgcgcugugacacuucaaacucguaccgugaguaauaaugcgccguccacggca

SEQ ID NO: 120 - RNA, 22 nt, Artificial Sequence
  source: /note="Description of Artificial Sequence: Synthetic oligonucleotide"
ucguaccgugaguaauaaugcg

SEQ ID NO: 121 - RNA, 22 nt, Artificial Sequence
  source: /note="Description of Artificial Sequence: Synthetic oligonucleotide"
cgcauuauuacucacgguacga

SEQ ID NO: 122 - RNA, 21 nt, Artificial Sequence
  source: /note="Description of Artificial Sequence: Synthetic oligonucleotide"
cauuauuacuuuugguacgcg

SEQ ID NO: 123 - RNA, 21 nt, Artificial Sequence
  source: /note="Description of Artificial Sequence: Synthetic oligonucleotide"
cgcguaccaaaaguaauaaug

SEQ ID NO: 124 - RNA, 9 nt, Artificial Sequence
  source: /note="Description of Artificial Sequence: Synthetic oligonucleotide"
ugauaauag

SEQ ID NO: 125 - RNA, 9 nt, Artificial Sequence
  source: /note="Description of Artificial Sequence: Synthetic oligonucleotide"
ugauaguaa

SEQ ID NO: 126 - RNA, 9 nt, Artificial Sequence
  source: /note="Description of Artificial Sequence: Synthetic oligonucleotide"
uaaugauag

SEQ ID NO: 127 - RNA, 9 nt, Artificial Sequence
  source: /note="Description of Artificial Sequence: Synthetic oligonucleotide"
ugauaauaa

SEQ ID NO: 128 - RNA, 9 nt, Artificial Sequence
  source: /note="Description of Artificial Sequence: Synthetic oligonucleotide"
ugauaguag

SEQ ID NO: 129 - RNA, 9 nt, Artificial Sequence
  source: /note="Description of Artificial Sequence: Synthetic oligonucleotide"
uaaugauga

SEQ ID NO: 130 - RNA, 9 nt, Artificial Sequence
  source: /note="Description of Artificial Sequence: Synthetic oligonucleotide"
uaauaguag

SEQ ID NO: 131 - RNA, 9 nt, Artificial Sequence
  source: /note="Description of Artificial Sequence: Synthetic oligonucleotide"
ugaugauga

SEQ ID NO: 132 - RNA, 9 nt, Artificial Sequence
  source: /note="Description of Artificial Sequence: Synthetic oligonucleotide"
uaauaauaa

SEQ ID NO: 133 - RNA, 9 nt, Artificial Sequence
  source: /note="Description of Artificial Sequence: Synthetic oligonucleotide"
uaguaguag

SEQ ID NO: 134 - RNA, 133 nt, Artificial Sequence
  source: /note="Description of Artificial Sequence: Synthetic polynucleotide"
gcuggagccucgguggccaugcuucuugccccuugggccuccccccagccccuccuccccuuccugcacccguacccccuccauaaaguaggaaacacuacaguggucuuugaauaaagucugagugggcggc

SEQ ID NO: 135 - RNA, 22 nt, Artificial Sequence
  source: /note="Description of Artificial Sequence: Synthetic oligonucleotide"
ccucugaaauucaguucuucag

SEQ ID NO: 136 - RNA, 22 nt, Artificial Sequence
  source: /note="Description of Artificial Sequence: Synthetic oligonucleotide"
ugagaacugaauuccauggguu

SEQ ID NO: 137 - RNA, 22 nt, Artificial Sequence
  source: /note="Description of Artificial Sequence: Synthetic oligonucleotide"
cuccuacauauuagcauuaaca

SEQ ID NO: 138 - RNA, 23 nt, Artificial Sequence
  source: /note="Description of Artificial Sequence: Synthetic oligonucleotide"
uuaaugcuaaucgugauaggggu

SEQ ID NO: 139 - RNA, 22 nt, Artificial Sequence
  source: /note="Description of Artificial Sequence: Synthetic oligonucleotide"
ccaguauuaacugugcugcuga

SEQ ID NO: 140 - RNA, 22 nt, Artificial Sequence
  source: /note="Description of Artificial Sequence: Synthetic oligonucleotide"
uagcagcacguaaauauuggcg

SEQ ID NO: 141 - RNA, 21 nt, Artificial Sequence
  source: /note="Description of Artificial Sequence: Synthetic oligonucleotide"
caacaccagucgaugggcugu

SEQ ID NO: 142 - RNA, 22 nt, Artificial Sequence
  source: /note="Description of Artificial Sequence: Synthetic oligonucleotide"
uagcuuaucagacugauguuga

SEQ ID NO: 143 - RNA, 22 nt, Artificial Sequence
  source: /note="Description of Artificial Sequence: Synthetic oligonucleotide"
ugucaguuugucaaauacccca

SEQ ID NO: 144 - RNA, 22 nt, Artificial Sequence
  source: /note="Description of Artificial Sequence: Synthetic oligonucleotide"
cguguauuugacaagcugaguu

SEQ ID NO: 145 - RNA, 22 nt, Artificial Sequence
  source: /note="Description of Artificial Sequence: Synthetic oligonucleotide"
uggcucaguucagcaggaacag

SEQ ID NO: 146 - RNA, 22 nt, Artificial Sequence
  source: /note="Description of Artificial Sequence: Synthetic oligonucleotide"
ugccuacugagcugauaucagu

SEQ ID NO: 147 - RNA, 21 nt, Artificial Sequence
  source: /note="Description of Artificial Sequence: Synthetic oligonucleotide"
uucacaguggcuaaguuccgc

SEQ ID NO: 148 - RNA, 22 nt, Artificial Sequence
  source: /note="Description of Artificial Sequence: Synthetic oligonucleotide"
agggcuuagcugcuugugagca

SEQ ID NO: 149 - RNA, 141 nt, Artificial Sequence
  source: /note="Description of Artificial Sequence: Synthetic polynucleotide"
ugauaauaggcuggagccucgguggccaugcuucuugccccuugggccuccccccagccccuccuccccuuccugcacccguaccccccgcauuauuacucacgguacgaguggucuuugaauaaagucugagugggcggc

SEQ ID NO: 150 - RNA, 119 nt, Artificial Sequence
  source: /note="Description of Artificial Sequence: Synthetic polynucleotide"
ugauaauaggcuggagccucgguggccaugcuucuugccccuugggccuccccccagccccuccuccccuuccugcacccguacccccguggucuuugaauaaagucugagugggcggc

SEQ ID NO: 151 - RNA, 142 nt, Artificial Sequence; identical to SEQ ID NO: 109
  source: /note="Description of Artificial Sequence: Synthetic polynucleotide"

SEQ ID NO: 152 - RNA, 164 nt, Artificial Sequence; identical to SEQ ID NO: 111
  source: /note="Description of Artificial Sequence: Synthetic polynucleotide"

SEQ ID NO: 153 - RNA, 23 nt, Artificial Sequence
  source: /note="Description of Artificial Sequence: Synthetic oligonucleotide"
uuaaugcuaauugugauaggggu

SEQ ID NO: 154 - RNA, 23 nt, Artificial Sequence
  source: /note="Description of Artificial Sequence: Synthetic oligonucleotide"
accccuaucacaauuagcauuaa

SEQ ID NO: 155 - RNA, 188 nt, Artificial Sequence
  source: /note="Description of Artificial Sequence: Synthetic polynucleotide"
ugauaauaguccauaaaguaggaaacacuacagcuggagccucgguggccaugcuucuugccccuugggccuccauaaaguaggaaacacuacauccccccagccccuccuccccuuccugcacccguacccccuccauaaaguaggaaacacuacaguggucuuugaauaaagucugagugggcggc

SEQ ID NO: 156 - RNA, 140 nt, Artificial Sequence
  source: /note="Description of Artificial Sequence: Synthetic polynucleotide"
ugauaauaggcuggagccucgguggccaugcuucuugccccuugggccuccccccagccccuccuccccuuccugcacccguacccccaguagugcuuucuacuuuaugguggucuuugaauaaagucugagugggcggc

SEQ ID NO: 157 - RNA, 182 nt, Artificial Sequence
  source: /note="Description of Artificial Sequence: Synthetic polynucleotide"
ugauaauagaguagugcuuucuacuuuauggcuggagccucgguggccaugcuucuugccccuugggccaguagugcuuucuacuuuauguccccccagccccuccuccccuuccugcacccguacccccaguagugcuuucuacuuuaugguggucuuugaauaaagucugagugggcggc

SEQ ID NO: 158 - RNA, 184 nt, Artificial Sequence
  source: /note="Description of Artificial Sequence: Synthetic polynucleotide"
ugauaauagaguagugcuuucuacuuuauggcuggagccucgguggccaugcuucuugccccuugggccuccauaaaguaggaaacacuacauccccccagccccuccuccccuuccugcacccguacccccaguagugcuuucuacuuuaugguggucuuugaauaaagucugagugggcggc

SEQ ID NO: 159 - RNA, 142 nt, Artificial Sequence
  source: /note="Description of Artificial Sequence: Synthetic polynucleotide"
ugauaauaggcuggagccucgguggccaugcuucuugccccuugggccuccccccagccccuccuccccuuccugcacccguacccccaccccuaucacaauuagcauuaaguggucuuugaauaaagucugagugggcggc

SEQ ID NO: 160 - RNA, 188 nt, Artificial Sequence
  source: /note="Description of Artificial Sequence: Synthetic polynucleotide"
ugauaauagaccccuaucacaauuagcauuaagcuggagccucgguggccaugcuucuugccccuugggccaccccuaucacaauuagcauuaauccccccagccccuccuccccuuccugcacccguacccccaccccuaucacaauuagcauuaaguggucuuugaauaaagucugagugggcggc

SEQ ID NO: 161 - RNA, 188 nt, Artificial Sequence
  source: /note="Description of Artificial Sequence: Synthetic polynucleotide"
ugauaauagaccccuaucacaauuagcauuaagcuggagccucgguggccaugcuucuugccccuugggccuccauaaaguaggaaacacuacauccccccagccccuccuccccuuccugcacccguacccccaccccuaucacaauuagcauuaaguggucuuugaauaaagucugagugggcggc

SEQ ID NO: 162 - RNA, 142 nt, Artificial Sequence; identical to SEQ ID NO: 104
  source: /note="Description of Artificial Sequence: Synthetic polynucleotide"

SEQ ID NO: 163 - RNA, 142 nt, Artificial Sequence; identical to SEQ ID NO: 105
  source: /note="Description of Artificial Sequence: Synthetic polynucleotide"

SEQ ID NO: 164 - RNA, 142 nt, Artificial Sequence
  source: /note="Description of Artificial Sequence: Synthetic polynucleotide"
ugauaauaggcuggagccucgguggccaugcuucuugccccuugggccuccauaaaguaggaaacacuacauccccccagccccuccuccccuuccugcacccguacccccguggucuuugaauaaagucugagugggcggc

SEQ ID NO: 165 - RNA, 70 nt, Artificial Sequence
  source: /note="Description of Artificial Sequence: Synthetic oligonucleotide"
gggaaauaagaguccauaaaguaggaaacacuacaagaaaagaagaguaagaagaaauauaagagccacc

SEQ ID NO: 166 - RNA, 70 nt, Artificial Sequence
  source: /note="Description of Artificial Sequence: Synthetic oligonucleotide"
gggaaauaagagagaaaagaagaguaauccauaaaguaggaaacacuacagaagaaauauaagagccacc

SEQ ID NO: 167 - RNA, 70 nt, Artificial Sequence
  source: /note="Description of Artificial Sequence: Synthetic oligonucleotide"
gggaaauaagagagaaaagaagaguaagaagaaauauaauccauaaaguaggaaacacuacagagccacc

SEQ ID NO: 168 - RNA, 23 nt, Artificial Sequence
  source: /note="Description of Artificial Sequence: Synthetic oligonucleotide"
accccuaucacaauuagcauuaa

SEQ ID NO: 169 - RNA, 181 nt, Artificial Sequence
  source: /note="Description of Artificial Sequence: Synthetic polynucleotide"
ugauaauagaguagugcuuucuacuuuauggcuggagccucgguggccaugcuucuugccccuugggccaguagugcuuucuacuuuauguccccccagccccucuccccuuccugcacccguacccccaguagugcuuucuacuuuaugguggucuuugaauaaagucugagugggcggc

SEQ ID NO: 170 - RNA, 142 nt, Artificial Sequence; identical to SEQ ID NO: 106
  source: /note="Description of Artificial Sequence: Synthetic polynucleotide"

SEQ ID NO: 171 - RNA, 142 nt, Artificial Sequence; identical to SEQ ID NO: 107
  source: /note="Description of Artificial Sequence: Synthetic polynucleotide"

SEQ ID NO: 172 - RNA, 142 nt, Artificial Sequence; identical to SEQ ID NO: 108
  source: /note="Description of Artificial Sequence: Synthetic polynucleotide"

SEQ ID NO: 173 - RNA, 142 nt, Artificial Sequence; identical to SEQ ID NO: 110
  source: /note="Description of Artificial Sequence: Synthetic polynucleotide"

SEQ ID NO: 174 - RNA, 164 nt, Artificial Sequence; identical to SEQ ID NO: 112
  source: /note="Description of Artificial Sequence: Synthetic polynucleotide"

SEQ ID NO: 175 - RNA, 119 nt, Artificial Sequence
  source: /note="Description of Artificial Sequence: Synthetic polynucleotide"
ugauaauaggcuggagccucgguggccuagcuucuugccccuugggccuccccccagccccuccuccccuuccugcacccguacccccguggucuuugaauaaagucugagugggcggc

SEQ ID NO: 176 - RNA, 142 nt, Artificial Sequence; identical to SEQ ID NO: 4
  source: /note="Description of Artificial Sequence: Synthetic polynucleotide"

SEQ ID NO: 177 - RNA, 141 nt, Artificial Sequence
  source: /note="Description of Artificial Sequence: Synthetic polynucleotide"
ugauaauaggcuggagccucgguggccuagcuucuugccccuugggccuccccccagccccuccuccccuuccugcacccguaccccccgcauuauuacucacgguacgaguggucuuugaauaaagucugagugggcggc

SEQ ID NO: 178 - RNA, 188 nt, Artificial Sequence
  source: /note="Description of Artificial Sequence: Synthetic polynucleotide"
ugauaauaguccauaaaguaggaaacacuacagcuggagccucgguggccuagcuucuugccccuugggccuccauaaaguaggaaacacuacauccccccagccccuccuccccuuccugcacccguacccccuccauaaaguaggaaacacuacaguggucuuugaauaaagucugagugggcggc

SEQ ID NO: 179 - RNA, 142 nt, Artificial Sequence
  source: /note="Description of Artificial Sequence: Synthetic polynucleotide"
ugauaauaguccauaaaguaggaaacacuacagcuggagccucgguggccuagcuucuugccccuugggccuccccccagccccuccuccccuuccugcacccguacccccguggucuuugaauaaagucugagugggcggc

SEQ ID NO: 180 - RNA, 142 nt, Artificial Sequence
  source: /note="Description of Artificial Sequence: Synthetic polynucleotide"
ugauaauaggcuggagccucgguggcuccauaaaguaggaaacacuacacuagcuucuugccccuugggccuccccccagccccuccuccccuuccugcacccguacccccguggucuuugaauaaagucugagugggcggc

SEQ ID NO: 181 - RNA, 142 nt, Artificial Sequence
  source: /note="Description of Artificial Sequence: Synthetic polynucleotide"
ugauaauaggcuggagccucgguggccuagcuucuugccccuugggccuccauaaaguaggaaacacuacauccccccagccccuccuccccuuccugcacccguacccccguggucuuugaauaaagucugagugggcggc

SEQ ID NO: 182 - RNA, 142 nt, Artificial Sequence
  source: /note="Description of Artificial Sequence: Synthetic polynucleotide"
ugauaauaggcuggagccucgguggccuagcuucuugccccuugggccuccccccagccccuccuccccuuccugcacccguacccccaccccuaucacaauuagcauuaaguggucuuugaauaaagucugagugggcggc

SEQ ID NO: 183 - RNA, 188 nt, Artificial Sequence
  source: /note="Description of Artificial Sequence: Synthetic polynucleotide"
ugauaauagaccccuaucacaauuagcauuaagcuggagccucgguggccuagcuucuugccccuugggccaccccuaucacaauuagcauuaauccccccagccccuccuccccuuccugcacccguacccccaccccuaucacaauuagcauuaaguggucuuugaauaaagucugagugggcggc

SEQ ID NO: 184 - RNA, 188 nt, Artificial Sequence
  source: /note="Description of Artificial Sequence: Synthetic polynucleotide"
ugauaauagaccccuaucacaauuagcauuaagcuggagccucgguggccuagcuucuugccccuugggccuccauaaaguaggaaacacuacauccccccagccccuccuccccuuccugcacccguacccccaccccuaucacaauuagcauuaaguggucuuugaauaaagucugagugggcggc

SEQ ID NO: 185 - DNA, 18 bp, Artificial Sequence
  source: /note="Description of Artificial Sequence: Synthetic oligonucleotide"
attgggcacccgtaaggg

SEQ ID NO: 186 - protein, 25 aa, Artificial Sequence
  source: /note="Description of Artificial Sequence: Synthetic peptide"
GSGVKQTLNFDLLKLAGDVESNPGP

SEQ ID NO: 187 - protein, 21 aa, Artificial Sequence
  source: /note="Description of Artificial Sequence: Synthetic peptide"
GSGEGRGSLLTCGDVEENPGP

SEQ ID NO: 188 - protein, 22 aa, Artificial Sequence
  source: /note="Description of Artificial Sequence: Synthetic peptide"
GSGATNFSLLKQAGDVEENPGP

SEQ ID NO: 189 - protein, 23 aa, Artificial Sequence
  source: /note="Description of Artificial Sequence: Synthetic peptide"
GSGQCTNYALLKLAGDVESNPGP

SEQ ID NO: 190 - protein, 20 aa, Artificial Sequence
  source: /note="Description of Artificial Sequence: Synthetic peptide"
  SITE (1)..(20): /note="This sequence may encompass 2-5 'Gly Gly Gly Ser' repeating units"
GGGSGGGSGGGSGGGSGGGS

SEQ ID NO: 191 - RNA, 66 nt, Artificial Sequence
  source: /note="Description of Artificial Sequence: Synthetic oligonucleotide"
ggaagcggagcuacuaacuucagccugcugaagcaggcuggagacguggaggagaacccuggaccu

SEQ ID NO: 192 - DNA, 108 bp, Artificial Sequence
  source: /note="Description of Artificial Sequence: Synthetic oligonucleotide"
  source: /note="Description of Combined DNA/RNA Molecule: Synthetic oligonucleotide"
uccggacucagauccggggaucucaaaauugucgcuccugucaaacaaacucuuaacuuugauuuacucaaacuggctggggauguagaaagcaauccaggtccacuc

SEQ ID NO: 193 - RNA, 47 nt, Artificial Sequence
  source: /note="Description of Artificial Sequence: Synthetic oligonucleotide"
aggaaauaagagagaaaagaagaguaagaagaaauauaagagccacc

SEQ ID NO: 194 - RNA, 57 nt, Artificial Sequence
  source: /note="Description of Artificial Sequence: Synthetic oligonucleotide"
aggaaauaagagagaaaagaagaguaagaagaaauauaagaccccggcgccgccacc

SEQ ID NO: 195 - RNA, 141 nt, Artificial Sequence
  source: /note="Description of Artificial Sequence: Synthetic polynucleotide"
ugauaauaggcuggagccucgguggccaugcuucuugccccuugggccuccccccagccccuccuccccuuccugcacccguaccccccaaacaccauugucacacuccaguggucuuugaauaaagucugagugggcggc

SEQ ID NO: 196 - RNA, 141 nt, Artificial Sequence
  source: /note="Description of Artificial Sequence: Synthetic polynucleotide"
ugauaauaggcuggagccucgguggccuagcuucuugccccuugggccuccccccagccccuccuccccuuccugcacccguaccccccaaacaccauugucacacuccaguggucuuugaauaaagucugagugggcggc

SEQ ID NO: 197 - protein, 210 aa, Homo sapiens
MWVTKLLPALLLQHVLLHLLLLPIAIPYAEGQRKRRNTIHEFKKSAKTTLIKIDPALKIKTKKVNTADQCANRCTRNKGLPFTCKAFVFDKARKQCLWFPFNSMSSGVKKEFGHEFDLYENKDYIRNCIIGKGRSYKGTVSITKSGIKCQPWSSMIPHEHSFLPSSYRGKDLQENYCRNPRGEEGGPWCFTSNPEVRYEVCDIPQCSEGK

SEQ ID NO: 198 - protein, 271 aa, Homo sapiens
MAKVPDMFEDLKNCYSENEEDSSSIDHLSLNQKSFYHVSYGPLHEGCMDQSVSLSISETSKTSKLTFKESMVVVATNGKVLKKRRLSLSQSITDDDLEAIANDSEEEIIKPRSAPFSFLSNVKYNFMRIIKYEFILNDALNQSIIRANDQYLTAAALHNLDEAVKFDMGAYKSSKDDAKITVILRISKTQLYVTAQDEDQPVLLKEMPEIPKTITGSETNLLFFWETHGTKNYFTSVAHPNLFIATKQDYWVCLAGGPPSITDFQILENQA

SEQ ID NO: 199 - protein, 269 aa, Homo sapiens
MAEVPELASEMMAYYSGNEDDLFFEADGPKQMKCSFQDLDLCPLDGGIQLRISDHHYSKGFRQAASVVVAMDKLRKMLVPCPQTFQENDLSTFFPFIFEEEPIFFDTWDNEAYVHDAPVRSLNCTLRDSQQKSLVMSGPYELKALHLQGQDMEQQVVFSMSFVQGEESNDKIPVALGLKEKNLYLSCVLKDDKPTLQLESVDPKNYPKKKMEKRFVFNKIEINNKLEFESAQFPNWYISTSQAENMPVFLGGTKGGQDITDFTMQFVSS

SEQ ID NO: 200 - protein, 212 aa, Homo sapiens
MNSFSTSAFGPVAFSLGLLLVLPAAFPAPVPPGEDSKDVAAPHRQPLTSSERIDKQIRYILDGISALRKETCNKSNMCESSKEALAENNLNLPKMAEKDGCFQSGFNEETCLVKIITGLLEFEVYLEYLQNRFESSEEQARAVQMSTKVLIQFLQKKAKNLDAITTPDPTTNASLLTKLQAQNQWLQDMTTHLILRSFKEFLQSSLRALRQM

SEQ ID NO: 201 - protein, 136 aa, Homo sapiens
MCESSKEALAENNLNLPKMAEKDGCFQSGFNEETCLVKIITGLLEFEVYLEYLQNRFESSEEQARAVQMSTKVLIQFLQKKAKNLDAITTPDPTTNASLLTKLQAQNQWLQDMTTHLILRSFKEFLQSSLRALRQM

SEQ ID NO: 202 - protein, 99 aa, Homo sapiens
MTSKLAVALLAAFLISAALCEGAVLPRSAKELRCQCIKTYSKPFHPKFIKELRVIESGPHCANTEIIVKLSDGRELCLDPKENWVQRVVEKFLKRAENS

SEQ ID NO: 203 - protein, 95 aa, Homo sapiens
MTSKLAVALLAAFLISAALCEGAVLPRSAKELRCQCIKTYSKPFHPKFIKELRVIESGPHCANTEIIVKLSDGRELCLDPKENWVQRVVEKFLKR

SEQ ID NO: 204 - protein, 178 aa, Homo sapiens
MHSSALLCCLVLLTGVRASPGQGTQSENSCTHFPGNLPNMLRDLRDAFSRVKTFFQMKDQLDNLLLKESLLEDFKGYLGCQALSEMIQFYLEEVMPQAENQDPDIKAHVNSLGENLKTLRLRLRRCHRFLPCENKSKAVEQVKNAFNKLQEKGIYKAMSEFDIFINYIEAYMTMKIRN

SEQ ID NO: 205 - protein, 233 aa, Homo sapiens
MSTESMIRDVELAEEALPKKTGGPQGSRRCLFLSLFSFLIVAGATTLFCLLHFGVIGPQREEFPRDLSLISPLAQAVRSSSRTPSDKPVAHVVANPQAEGQLQWLNRRANALLANGVELRDNQLVVPSEGLYLIYSQVLFKGQGCPSTHVLLTHTISRIAVSYQTKVNLLSAIKSPCQRETPEGAEAKPWYEPIYLGGVFQLEKGDRLSAEINRPDYLDFAESGQVYFGIIAL

SEQ ID NO: 206 - protein, 99 aa, Homo sapiens
MKVSAALLCLLLIAATFIPQGLAQPDAINAPVTCCYNFTNRKISVQRLASYRRITSSKCPKEAVIFKTIVAKEICADPKQKWVQDSMDHLDKQTQTPKT

SEQ ID NO: 207 - protein, 89 aa, Homo sapiens
MNAKVVVVLVLVLTALCLSDGKPVSLSYRCPCRFFESHVARANVKHLKILNTPNCALQIVARLKNNNRQVCIDPKLKWIQEYLEKALNK

SEQ ID NO: 208 - protein, 93 aa, Homo sapiens
MNAKVVVVLVLVLTALCLSDGKPVSLSYRCPCRFFESHVARANVKHLKILNTPNCALQIVARLKNNNRQVCIDPKLKWIQEYLEKALNKRFKM

SEQ ID NO: 209 - protein, 140 aa, Homo sapiens
MNAKVVVVLVLVLTALCLSDGKPVSLSYRCPCRFFESHVARANVKHLKILNTPNCALQIVARLKNNNRQVCIDPKLKWIQEYLEKALNNLISAAPAGKRVIAGARALHPSPPRACPTARALCEIRLWPPPEWSWPSPGDV

SEQ ID NO: 210 - protein, 119 aa, Homo sapiens
MNAKVVVVLVLVLTALCLSDGKPVSLSYRCPCRFFESHVARANVKHLKILNTPNCALQIVARLKNNNRQVCIDPKLKWIQEYLEKALNKGRREEKVGKKEKIGKKKRQKKRKAAQKRKN

SEQ ID NO: 211 - protein, 103 aa, Homo sapiens
MNAKVVVVLVLVLTALCLSDGKPVSLSYRCPCRFFESHYCTCLIRVSFHGATPLTQGSWVLYSLSCAGGETGLREPGPMVSPRVESHQEGRLGVPGPVNLGKA

SEQ ID NO: 212 - protein, 191 aa, Homo sapiens
MNFLLSWVHWSLALLLYLHHAKWSQAAPMAEGGGQNHHEVVKFMDVYQRSYCHPIETLVDIFQEYPDEIEYIFKPSCVPLMRCGGCCNDEGLECVPTEESNITMQIMRIKPHQGQHIGEMSFLQHNKCECRPKKDRARQENPCGPCSERRKHLFVQDPQTCKCSCKNTDSRCKARQLELNERTCRCDKPRR

SEQ ID NO: 213 - protein, 1069 aa, Homo sapiens
MFSFVDLRLLLLLAATALLTHGQEEGQVEGQDEDIPPITCVQNGLRYHDRDVWKPEPCRICVCDNGKVLCDDVICDETKNCPGAEVPEGECCPVCPDGSESPTDQETTGVEGPKGDTGPRGPRGPAGPPGRDGIPGQPGLPGPPGPPGPPGPPGLGGNFAPQLSYGYDEKSTGGISVPGPMGPSGPRGLPGPPGAPGPQGFQGPPGEPGEPGASGPMGPRGPPGPPGKNGDDGEAGKPGRPGERGPPGPQGARGLPGTAGLPGMKGHRGFSGLDGAKGDAGPAGPKGEPGSPGENGAPGQMGPRGLPGERGRPGAPGPAGARGNDGATGAAGPPGPTGPAGPPGFPGAVGAKGEAGPQGPRGSEGPQGVRGEPGPPGPAGAAGPAGNPGADGQPGAKGANGAPGIAGAPGFPGARGPSGPQGPGGPPGPKGNSGEPGAPGSKGDTGAKGEPGPVGVQGPPGPAGEEGKRGARGEPGPTGLPGPPGERGGPGSRGFPGADGVAGPKGPAGERGSPGPAGPKGSPGEAGRPGEAGLPGAKGLTGSPGSPGPDGKTGPPGPAGQDGRPGPPGPPGARGQAGVMGFPGPKGAAGEPGKAGERGVPGPPGAVGPAGKDGEAGAQGPPGPAGPAGERGEQGPAGSPGFQGLPGPAGPPGEAGKPGEQGVPGDLGAPGPSGARGERGFPGERGVQGPPGPAGPRGANGAPGNDGAKGDAGAPGAPGSQGAPGLQGMPGERGAAGLPGPKGDRGDAGPKGADGSPGKDGVRGLTGPIGPPGPAGAPGDKGESGPSGPAGPTGARGAPGDRGEPGPPGPAGFAGPPGADGQPGAKGEPGDAGAKGDAGPPGPAGPAGPPGPIGNVGAPGAKGARGSAGPPGATGFPGAAGRVGPPGPSGNAGPPGPPGPAGKEGGKGPRGETGPAGRPGEVGPPGPPGPAGEKGSPGADGPAGAPGTPGPQGIAGQRGVVGLPGQRGERGFPGLPGPSGEPGKQGPSGASGERGPPGPMGPPGLAGPPGESGREGAPGAEGSPGRDGSPGAKGDRGETGPAGPPGAPGAPGAPGPVGPAGKSGDRGET

SEQ ID NO: 214 - protein, 1366 aa, Homo sapiens
MLSFVDTRTLLLLAVTLCLATCQSLQEETVRKGPAGDRGPRGERGPPGPPGRDGEDGPTGPPGPPGPPGPPGLGGNFAAQYDGKGVGLGPGPMGLMGPRGPPGAAGAPGPQGFQGPAGEPGEPGQTGPAGARGPAGPPGKAGEDGHPGKPGRPGERGVVGPQGARGFPGTPGLPGFKGIRGHNGLDGLKGQPGAPGVKGEPGAPGENGTPGQTGARGLPGERGRVGAPGPAGARGSDGSVGPVGPAGPIGSAGPPGFPGAPGPKGEIGAVGNAGPAGPAGPRGEVGLPGLSGPVGPPGNPGANGLTGAKGAAGLPGVAGAPGLPGPRGIPGPVGAAGATGARGLVGEPGPAGSKGESGNKGEPGSAGPQGPPGPSGEEGKRGPNGEAGSAGPPGPPGLRGSPGSRGLPGADGRAGVMGPPGSRGASGPAGVRGPNGDAGRPGEPGLMGPRGLPGSPGNIGPAGKEGPVGLPGIDGRPGPIGPAGARGEPGNIGFPGPKGPTGDPGKNGDKGHAGLAGARGAPGPDGNNGAQGPPGPQGVQGGKGEQGPPGPPGFQGLPGPSGPAGEVGKPGERGLHGEFGLPGPAGPRGERGPPGESGAAGPTGPIGSRGPSGPPGPDGNKGEPGVVGAVGTAGPSGPSGLPGERGAAGIPGGKGEKGEPGLRGEIGNPGRDGARGAPGAVGAPGPAGATGDRGEAGAAGPAGPAGPRGSPGERGEVGPAGPNGFAGPAGAAGQPGAKGERGAKGPKGENGVVGPTGPVGAAGPAGPNGPPGPAGSRGDGGPPGMTGFPGAAGRTGPPGPSGISGPPGPPGPAGKEGLRGPRGDQGPVGRTGEVGAVGPPGFAGEKGPSGEAGTAGPPGTPGPQGLLGAPGILGLPGSRGERGLPGVAGAVGEPGPLGIAGPPGARGPPGAVGSPGVNGAPGEAGRDGNPGNDGPPGRDGQPGHKGERGYPGNIGPVGAAGAPGPHGPVGPAGKHGNRGETGPSGPVGPAGAVGPRGPSGPQGIRGDKGEPGEKGPRGLPGLKGHNGLQGLPGIAGHHGDQGAPGSVGPAGPRGPAGPSGPAGKDGRTGHPGTVGPAGIRGPQGHQGPAGPPGPPGPPGPPGVSGGGYDFGYDGDFYRADQPRSAPSLRPKDYEVDATLKSLNNQIETLLTPEGSRKNPARTCRDLRLSHPEWSSGYYWIDPNQGCTMDAIKVYCDFSTGETCIRAQPENIPAKNWYRSSKDKKHVWLGETINAGSQFEYNVEGVTSKEMATQLAFMRLLANYASQNITYHCKNSIAYMDEETGNLKKAVILQGSNDVELVAEGNSRFTYTVLVDGCSKKTNEWGKTIIEYKTNKPSRLPFLDIAPLDIGGADQEFFVDIGPVCFK

SEQ ID NO: 215 - protein, 1466 aa, Homo sapiens
MMSFVQKGSWLLLALLHPTIILAQQEAVEGGCSHLGQSYADRDVWKPEPCQICVCDSGSVLCDDIICDDQELDCPNPEIPFGECCAVCPQPPTAPTRPPNGQGPQGPKGDPGPPGIPGRNGDPGIPGQPGSPGSPGPPGICESCPTGPQNYSPQYDSYDVKSGVAVGGLAGYPGPAGPPGPPGPPGTSGHPGSPGSPGYQGPPGEPGQAGPSGPPGPPGAIGPSGPAGKDGESGRPGRPGERGLPGPPGIKGPAGIPGFPGMKGHRGFDGRNGEKGETGAPGLKGENGLPGENGAPGPMGPRGAPGERGRPGLPGAAGARGNDGARGSDGQPGPPGPPGTAGFPGSPGAKGEVGPAGSPGSNGAPGQRGEPGPQGHAGAQGPPGPPGINGSPGGKGEMGPAGIPGAPGLMGARGPPGPAGANGAPGLRGGAGEPGKNGAKGEPGPRGERGEAGIPGVPGAKGEDGKDGSPGEPGANGLPGAAGERGAPGFRGPAGPNGIPGEKGPAGERGAPGPAGPRGAAGEPGRDGVPGGPGMRGMPGSPGGPGSDGKPGPPGSQGESGRPGPPGPSGPRGQPGVMGFPGPKGNDGAPGKNGERGGPGGPGPQGPPGKNGETGPQGPPGPTGPGGDKGDTGPPGPQGLQGLPGTGGPPGENGKPGEPGPKGDAGAPGAPGGKGDAGAPGERGPPGLAGAPGLRGGAGPPGPEGGKGAAGPPGPPGAAGTPGLQGMPGERGGLGSPGPKGDKGEPGGPGADGVPGKDGPRGPTGPIGPPGPAGQPGDKGEGGAPGLPGIAGPRGSPGERGETGPPGPAGFPGAPGQNGEPGGKGERGAPGEKGEGGPPGVAGPPGGSGPAGPPGPQGVKGERGSPGGPGAAGFPGARGLPGPPGSNGNPGPPGPSGSPGKDGPPGPAGNTGAPGSPGVSGPKGDAGQPGEKGSPGAQGPPGAPGPLGIAGITGARGLAGPPGMPGPRGSPGPQGVKGESGKPGANGLSGERGPPGPQGLPGLAGTAGEPGRDGNPGSDGLPGRDGSPGGKGDRGENGSPGAPGAPGHPGPPGPVGPAGKSGDRGESGPAGPAGAPGPAGSRGAPGPQGPRGDKGETGERGAAGIKGHRGFPGNPGAPGSPGPAGQQGAIGSPGPAGPRGPVGPSGPPGKDGTSGHPGPIGPPGPRGNRGERGSEGSPGHPGQPGPPGPPGAPGPCCGGVGAAAIAGIGGEKAGGFAPYYGDEPMDFKINTDEIMTSLKSVNGQIESLISPDGSRKNPARNCRDLKFCHPELKSGEYWVDPNQGCKLDAIKVFCNMETGETCISANPLNVPRKHWWTDSSAEKKHVWFGESMDGGFQFSYGNPELPEDVLDVHLAFLRLLSSRASQNITYHCKNSIAYMDQASGNVKKALKLMGSNEGEFKAEGNSKFTYTVLEDGCTKHTGEWSKTVFEYRTRKAVRLPIVDIAPYDIGGPDQEFGVDVGPVCFL

SEQ ID NO: 216 - protein, 1669 aa, Homo sapiens
MGPRLSVWLLLLPAALLLHEEHSRAAAKGGCAGSGCGKCDCHGVKGQKGERGLPGLQGVIGFPGMQGPEGPQGPPGQKGDTGEPGLPGTKGTRGPPGASGYPGNPGLPGIPGQDGPPGPPGIPGCNGTKGERGPLGPPGLPGFAGNPGPPGLPGMKGDPGEILGHVPGMLLKGERGFPGIPGTPGPPGLPGLQGPVGPPGFTGPPGPPGPPGPPGEKGQMGLSFQGPKGDKGDQGVSGPPGVPGQAQVQEKGDFATKGEKGQKGEPGFQGMPGVGEKGEPGKPGPRGKPGKDGDKGEKGSPGFPGEPGYPGLIGRQGPQGEKGEAGPPGPPGIVIGTGPLGEKGERGYPGTPGPRGEPGPKGFPGLPGQPGPPGLPVPGQAGAPGFPGERGEKGDRGFPGTSLPGPSGRDGLPGPPGSPGPPGQPGYTNGIVECQPGPPGDQGPPGIPGQPGFIGEIGEKGQKGESCLICDIDGYRGPPGPQGPPGEIGFPGQPGAKGDRGLPGRDGVAGVPGPQGTPGLIGQPGAKGEPGEFYFDLRLKGDKGDPGFPGQPGMPGRAGSPGRDGHPGLPGPKGSPGSVGLKGERGPPGGVGFPGSRGDTGPPGPPGYGPAGPIGDKGQAGFPGGPGSPGLPGPKGEPGKIVPLPGPPGAEGLPGSPGFPGPQGDRGFPGTPGRPGLPGEKGAVGQPGIGFPGPPGPKGVDGLPGDMGPPGTPGRPGFNGLPGNPGVQGQKGEPGVGLPGLKGLPGLPGIPGTPGEKGSIGVPGVPGEHGAIGPPGLQGIRGEPGPPGLPGSVGSPGVPGIGPPGARGPPGGQGPPGLSGPPGIKGEKGFPGFPGLDMPGPKGDKGAQGLPGITGQSGLPGLPGQQGAPGIPGFPGSKGEMGVMGTPGQPGSPGPVGAPGLPGEKGDHGFPGSSGPRGDPGLKGDKGDVGLPGKPGSMDKVDMGSMKGQKGDQGEKGQIGPIGEKGSRGDPGTPGVPGKDGQAGQPGQPGPKGDPGISGTPGAPGLPGPKGSVGGMGLPGTPGEKGVPGIPGPQGSPGLPGDKGAKGEKGQAGPPGIGIPGLRGEKGDQGIAGFPGSPGEKGEKGSIGIPGMPGSPGLKGSPGSVGYPGSPGLPGEKGDKGLPGLDGIPGVKGEAGLPGTPGPTGPAGQKGEPGSDGIPGSAGEKGEPGLPGRGFPGFPGAKGDKGSKGEVGFPGLAGSPGIPGSKGEQGFMGPPGPQGQPGLPGSPGHATEGPKGDRGPQGQPGLPGLPGPMGPPGLPGIDGVKGDKGNPGWPGAPGVPGPKGDPGFQGMPGIGGSPGITGSKGDMGPPGVPGFQGPKGLPGLQGIKGDQGDQGVPGAKGLPGPPGPPGPYDIIKGEPGLPGPEGPPGLKGLQGLPGPKGQQGVTGLVGIPGPPGIPGFDGAPGQKGEMGPAGPTGPRGFPGPPGPDGLPGSMGPPGTPSVDHGFLVTRHSQTIDDPQCPSGTKILYHGYSLLYVQGNERAHGQDLGTAGSCLRKFSTMPFLFCNINNVCNFASRNDYSYWLSTPEPMPMSMAPITGENIRPFISRCAVCEAPAMVMAVHSQTIQIPPCPSGWSSLWIGYSFVMHTSAGAEGSGQALASPGSCLEEFRSAPFIECHGRGTCNYYANAYSFWLATIERSEMFKKPTPSTLKAGELRTHVSRCQVCMRRT

SEQ ID NO: 217 - protein, 1712 aa, Homo sapiens
MGRDQRAVAGPALRRWLLLGTVTVGFLAQSVLAGVKKFDVPCGGRDCSGGCQCYPEKGGRGQPGPVGPQGYNGPPGLQGFPGLQGRKGDKGERGAPGVTGPKGDVGARGVSGFPGADGIPGHPGQGGPRGRPGYDGCNGTQGDSGPQGPPGSEGFTGPPGPQGPKGQKGEPYALPKEERDRYRGEPGEPGLVGFQGPPGRPGHVGQMGPVGAPGRPGPPGPPGPKGQQGNRGLGFYGVKGEKGDVGQPGPNGIPSDTLHPIIAPTGVTFHPDQYKGEKGSEGEPGIRGISLKGEEGIMGFPGLRGYPGLSGEKGSPGQKGSRGLDGYQGPDGPRGPKGEAGDPGPPGLPAYSPHPSLAKGARGDPGFPGAQGEPGSQGEPGDPGLPGPPGLSIGDGDQRRGLPGEMGPKGFIGDPGIPALYGGPPGPDGKRGPPGPPGLPGPPGPDGFLFGLKGAKGRAGFPGLPGSPGARGPKGWKGDAGECRCTEGDEAIKGLPGLPGPKGFAGINGEPGRKGDRGDPGQHGLPGFPGLKGVPGNIGAPGPKGAKGDSRTITTKGERGQPGVPGVPGMKGDDGSPGRDGLDGFPGLPGPPGDGIKGPPGDPGYPGIPGTKGTPGEMGPPGLGLPGLKGQRGFPGDAGLPGPPGFLGPPGPAGTPGQIDCDTDVKRAVGGDRQEAIQPGCIGGPKGLPGLPGPPGPTGAKGLRGIPGFAGADGGPGPRGLPGDAGREGFPGPPGFIGPRGSKGAVGLPGPDGSPGPIGLPGPDGPPGERGLPGEVLGAQPGPRGDAGVPGQPGLKGLPGDRGPPGFRGSQGMPGMPGLKGQPGLPGPSGQPGLYGPPGLHGFPGAPGQEGPLGLPGIPGREGLPGDRGDPGDTGAPGPVGMKGLSGDRGDAGFTGEQGHPGSPGFKGIDGMPGTPGLKGDRGSPGMDGFQGMPGLKGRPGFPGSKGEAGFFGIPGLKGLAGEPGFKGSRGDPGPPGPPPVILPGMKDIKGEKGDEGPMGLKGYLGAKGIQGMPGIPGLSGIPGLPGRPGHIKGVKGDIGVPGIPGLPGFPGVAGPPGITGFPGFIGSRGDKGAPGRAGLYGEIGATGDFGDIGDTINLPGRPGLKGERGTTGIPGLKGFFGEKGTEGDIGFPGITGVTGVQGPPGLKGQTGFPGLTGPPGSQGELGRIGLPGGKGDDGWPGAPGLPGFPGLRGIRGLHGLPGTKGFPGSPGSDIHGDPGFPGPPGERGDPGEANTLPGPVGVPGQKGDQGAPGERGPPGSPGLQGFPGITPPSNISGAPGDKGAPGIFGLKGYRGPPGPPGSAALPGSKGDTGNPGAPGTPGTKGWAGDSGPQGRPGVFGLPGEKGPRGEQGFMGNTGPTGAVGDRGPKGPKGDPGFPGAPGTVGAPGIAGIPQKIAVQPGTVGPQGRRGPPGAPGEMGPQGPPGEPGFRGAPGKAGPQGRGGVSAVPGFRGDEGPIGHQGPIGQEGAPGRPGSPGLPGMPGRSVSIGYLLVKHSQTDQEPMCPVGMNKLWSGYSLLYFEGQEKAHNQDLGLAGSCLARFSTMPFLYCNPGDVCYYASRNDKSYWLSTTAPLPMMPVAEDEIKPYISRCSVCEAPAIAIAVHSQDVSIPHCPAGWRSLWIGYSFLMHTAAGDEGGGQSLVSPGSCLEDFRATPFIECNGGRGTCHYYANKYSFWLTTIPEQSFQGSPSADTLKAGLIRTHISRCQVCMKNL

SEQ ID NO: 218 - protein, 1838 aa, Homo sapiens
MDVHTRWKARSALRPGAPLLPPLLLLLLWAPPPSRAAQPADLLKVLDFHNLPDGITKTTGFCATRRSSKGPDVAYRVTKDAQLSAPTKQLYPASAFPEDFSILTTVKAKKGSQAFLVSIYNEQGIQQIGLELGRSPVFLYEDHTGKPGPEDYPLFRGINLSDGKWHRIALSVHKKNVTLILDCKKKTTKFLDRSDHPMIDINGIIVFGTRILDEEVFEGDIQQLLFVSDHRAAYDYCEHYSPDCDTAVPDTPQSQDPNPDEYYTEGDGEGETYYYEYPYYEDPEDLGKEPTPSKKPVEAAKETTEVPEELTPTPTEAAPMPETSEGAGKEEDVGIGDYDYVPSEDYYTPSPYDDLTYGEGEENPDQPTDPGAGAEIPTSTADTSNSSNPAPPPGEGADDLEGEFTEETIRNLDENYYDPYYDPTSSPSEIGPGMPANQDTIYEGIGGPRGEKGQKGEPAIIEPGMLIEGPPGPEGPAGLPGPPGTMGPTGQVGDPGERGPPGRPGLPGADGLPGPPGTMLMLPFRFGGGGDAGSKGPMVSAQESQAQAILQQARLALRGPAGPMGLTGRPGPVGPPGSGGLKGEPGDVGPQGPRGVQGPPGPAGKPGRRGRAGSDGARGMPGQTGPKGDRGFDGLAGLPGEKGHRGDPGPSGPPGPPGDDGERGDDGEVGPRGLPGEPGPRGLLGPKGPPGPPGPPGVTGMDGQPGPKGNVGPQGEPGPPGQQGNPGAQGLPGPQGAIGPPGEKGPLGKPGLPGMPGADGPPGHPGKEGPPGEKGGQGPPGPQGPIGYPGPRGVKGADGIRGLKGTKGEKGEDGFPGFKGDMGIKGDRGEIGPPGPRGEDGPEGPKGRGGPNGDPGPLGPPGEKGKLGVPGLPGYPGRQGPKGSIGFPGFPGANGEKGGRGTPGKPGPRGQRGPTGPRGERGPRGITGKPGPKGNSGGDGPAGPPGERGPNGPQGPTGFPGPKGPPGPPGKDGLPGHPGQRGETGFQGKTGPPGPPGVVGPQGPTGETGPMGERGHPGPPGPPGEQGLPGLAGKEGTKGDPGPAGLPGKDGPPGLRGFPGDRGLPGPVGALGLKGNEGPPGPPGPAGSPGERGPAGAAGPIGIPGRPGPQGPPGPAGEKGAPGEKGPQGPAGRDGLQGPVGLPGPAGPVGPPGEDGDKGEIGEPGQKGSKGDKGEQGPPGPTGPQGPIGQPGPSGADGEPGPRGQQGLFGQKGDEGPRGFPGPPGPVGLQGLPGPPGEKGETGDVGQMGPPGPPGPRGPSGAPGADGPQGPPGGIGNPGAVGEKGEPGEAGEPGLPGEGGPPGPKGERGEKGESGPSGAAGPPGPKGPPGDDGPKGSPGPVGFPGDPGPPGEPGPAGQDGPPGDKGDDGEPGQTGSPGPTGEPGPSGPPGKRGPPGPAGPEGRQGEKGAKGEAGLEGPPGKTGPIGPQGAPGKPGPDGLRGIPGPVGEQGLPGSPGPDGPPGPMGPPGLPGLKGDSGPKGEKGHPGLIGLIGPPGEQGEKGDRGLPGPQGSSGPKGEQGITGPSGPIGPPGPPGLPGPPGPKGAKGSSGPTGPKGEAGHPGPPGPPGPPGEVIQPLPIQASRTRRNIDASQLLDDGNGENYVDYADGMEEIFGSLNSLKLEIEQMKRPLGTQQNPARTCKDLQLCHPDFPDGEYWVDPNQGCSRDSFKVYCNFTAGGSTCVFPDKKSEGARITSWPKENPGSWFSEFKRGKLLSYVDAEGNPVGVVQMTFLRLLSASAHQNVTYHCYQSVAWQDAATGSYDKALRFLGSNDEEMSYDNNPYIRALVDGCATKKGYQKTVLEIDTPKVEQVPIVDIMFNDFGEASQKFGFEVGPACFMG

SEQ ID NO: 219 - protein, 1838 aa, Homo sapiens
MDVHTRWKARSALRPGAPLLPPLLLLLLWAPPPSRAAQPADLLKVLDFHNLPDGITKTTGFCATRRSSKGPDVAYRVTKDAQLSAPTKQLYPASAFPEDFSILTTVKAKKGSQAFLVSIYNEQGIQQIGLELGRSPVFLYEDHTGKPGPEDYPLFRGINLSDGKWHRIALSVHKKNVTLILDCKKKTTKFLDRSDHPMIDINGIIVFGTRILDEEVFEGDIQQLLFVSDHRAAYDYCEHYSPDCDTAVPDTPQSQDPNPDEYYTEGDGEGETYYYEYPYYEDPEDLGKEPTPSKKPVEAAKETTEVPEELTPTPTEAAPMPETSEGAGKEEDVGIGDYDYVPSEDYYTPSPYDDLTYGEGEENPDQPTDPGAGAEIPTSTADTSNSSNPAPPPGEGADDLEGEFTEETIRNLDENYYDPYYDPTSSPSEIGPGMPANQDTIYEGIGGPRGEKGQKGEPAIIEPGMLIEGPPGPEGPAGLPGPPGTMGPTGQVGDPGERGPPGRPGLPGADGLPGPPGTMLMLPFRFGGGGDAGSKGPMVSAQESQAQAILQQARLALRGPAGPMGLTGRPGPVGPPGSGGLKGEPGDVGPQGPRGVQGPPGPAGKPGRRGRAGSDGARGMPGQTGPKGDRGFDGLAGLPGEKGHRGDPGPSGPPGPPGDDGERGDDGEVGPRGLPGEPGPRGLLGPKGPPGPPGPPGVTGMDGQPGPKGNVGPQGEPGPPGQQGNPGAQGLPGPQGAIGPPGEKGPLGKPGLPGMPGADGPPGHPGKEGPPGEKGGQGPPGPQGPIGYPGPRGVKGADGIRGLKGTKGEKGEDGFPGFKGDMGIKGDRGEIGPPGPRGEDGPEGPKGRGGPNGDPGPLGPPGEKGKLGVPGLPGYPGRQGPKGSIGFPGFPGANGEKGGRGTPGKPGPRGQRGPTGPRGERGPRGITGKPGPKGNSGGDGPAGPPGERGPNGPQGPTGFPGPKGPPGPPGKDGLPGHPGQRGETGFQGKTGPPGPPGVVGPQGPTGETGPMGERGHPGPPGPPGEQGLPGLAGKEGTKGDPGPAGLPGKDGPPGLRGFPGDRGLPGPVGALGLKGNEGPPGPPGPAGSPGERGPAGAAGPIGIPGRPGPQGPPGPAGEKGAPGEKGPQGPAGRDGLQGPVGLPGPAGPVGPPGEDGDKGEIGEPGQKGSKGDKGEQGPPGPTGPQGPIGQPGPSGADGEPGPRGQQGLFGQKGDEGPRGFPGPPGPVGLQGLPGPPGEKGETGDVGQMGPPGPPGPRGPSGAPGADGPQGPPGGIGNPGAVGEKGEPGEAGEPGLPGEGGPPGPKGERGEKGESGPSGAAGPPGPKGPPGDDGPKGSPGPVGFPGDPGPPGEPGPAGQDGPPGDKGDDGEPGQTGSPGPTGEPGPSGPPGKRGPPGPAGPEGRQGEKGAKGEAGLEGPPGKTGPIGPQGAPGKPGPDGLRGIPGPVGEQGLPGSPGPDGPPGPMGPPGLPGLKGDSGPKGEKGHPGLIGLIGPPGEQGEKGDRGLPGPQGSSGPKGEQGITGPSGPIGPPGPPGLPGPPGPKGAKGSSGPTGPKGEAGHPGPPGPPGPPGEVIQPLPIQASRTRRNIDASQLLDDGNGENYVDYADGMEEIFGSLNSLKLEIEQMKRPLGTQQNPARTCKDLQLCHPDFPDGEYWVDPNQGCSRDSFKVYCNFTAGGSTCVFPDKKSEGSKMARWPKEQPSTWYSQYKRGSLLSYVDAEGNPVGVVQMTFLRLLSASAHQNVTYHCYQSVAWQDAATGSYDKALRFLGSNDEEMSYDNNPYIRALVDGCATKKGYQKTVLEIDTPKVEQVPIVDIMFNDFGEASQKFGFEVGPACFMG

SEQ ID NO: 220 - protein, 1499 aa, Homo sapiens
MMANWAEARPLLILIVLLGQFVSIKAQEEDEDEGYGEEIACTQNGQMYLNRDIWKPAPCQICVCDNGAILCDKIECQDVLDCADPVTPPGECCPVCSQTPGGGNTNFGRGRKGQKGEPGLVPVVTGIRGRPGPAGPPGSQGPRGERGPKGRPGPRGPQGIDGEPGVPGQPGAPGPPGHPSHPGPDGLSRPFSAQMAGLDEKSGLGSQVGLMPGSVGPVGPRGPQGLQGQQGGAGPTGPPGEPGDPGPMGPIGSRGPEGPPGKPGEDGEPGRNGNPGEVGFAGSPGARGFPGAPGLPGLKGHRGHKGLEGPKGEVGAPGSKGEAGPTGPMGAMGPLGPRGMPGERGRLGPQGAPGQRGAHGMPGKPGPMGPLGIPGSSGFPGNPGMKGEAGPTGARGPEGPQGQRGETGPPGPVGSPGLPGAIGTDGTPGAKGPTGSPGTSGPPGSAGPPGSPGPQGSTGPQGIRGQPGDPGVPGFKGEAGPKGEPGPHGIQGPIGPPGEEGKRGPRGDPGTVGPPGPVGERGAPGNRGFPGSDGLPGPKGAQGERGPVGSSGPKGSQGDPGRPGEPGLPGARGLTGNPGVQGPEGKLGPLGAPGEDGRPGPPGSIGIRGQPGSMGLPGPKGSSGDPGKPGEAGNAGVPGQRGAPGKDGEVGPSGPVGPPGLAGERGEQGPPGPTGFQGLPGPPGPPGEGGKPGDQGVPGDPGAVGPLGPRGERGNPGERGEPGITGLPGEKGMAGGHGPDGPKGSPGPSGTPGDTGPPGLQGMPGERGIAGTPGPKGDRGGIGEKGAEGTAGNDGARGLPGPLGPPGPAGPTGEKGEPGPRGLVGPPGSRGNPGSRGENGPTGAVGFAGPQGPDGQPGVKGEPGEPGQKGDAGSPGPQGLAGSPGPHGPNGVPGLKGGRGTQGPPGATGFPGSAGRVGPPGPAGAPGPAGPLGEPGKEGPPGLRGDPGSHGRVGDRGPAGPPGGPGDKGDPGEDGQPGPDGPPGPAGTTGQRGIVGMPGQRGERGMPGLPGPAGTPGKVGPTGATGDKGPPGPVGPPGSNGPVGEPGPEGPAGNDGTPGRDGAVGERGDRGDPGPAGLPGSQGAPGTPGPVGAPGDAGQRGDPGSRGPIGPPGRAGKRGLPGPQGPRGDKGDHGDRGDRGQKGHRGFTGLQGLPGPPGPNGEQGSAGIPGPFGPRGPPGPVGPSGKEGNPGPLGPIGPPGVRGSVGEAGPEGPPGEPGPPGPPGPPGHLTAALGDIMGHYDESMPDPLPEFTEDQAAPDDKNKTDPGVHATLKSLSSQIETMRSPDGSKKHPARTCDDLKLCHSAKQSGEYWIDPNQGSVEDAIKVYCNMETGETCISANPSSVPRKTWWASKSPDNKPVWYGLDMNRGSQFAYGDHQSPNTAITQMTFLRLLSKEASQNITYICKNSVGYMDDQAKNLKKAVVLKGANDLDIKAEGNIRFRYIVLQDTCSKRNGNVGKTVFEYRTQNVARLPIIDLAPVDVGGTDQEFGVEIGPVCFV

SEQ ID NO: 221 - protein, 1028 aa, Homo sapiens
MRAARALLPLLLQACWTAAQDEPETPRAVAFQDCPVDLFFVLDTSESVALRLKPYGALVDKVKSFTKRFIDNLRDRYYRCDRNLVWNAGALHYSDEVEIIQGLTRMPGGRDALKSSVDAVKYFGKGTYTDCAIKKGLEQLLVGGSHLKENKYLIVVTDGHPLEGYKEPCGGLEDAVNEAKHLGVKVFSVAITPDHLEPRLSIIATDHTYRRNFTAADWGQSRDAEEAISQTIDTIVDMIKNNVEQVCCSFECQPARGPPGLRGDPGFEGERGKPGLPGEKGEAGDPGRPGDLGPVGYQGMKGEKGSRGEKGSRGPKGYKGEKGKRGIDGVDGVKGEMGYPGLPGCKGSPGFDGIQGPPGPKGDPGAFGLKGEKGEPGADGEAGRPGSSGPSGDEGQPGEPGPPGEKGEAGDEGNPGPDGAPGERGGPGERGPRGTPGTRGPRGDPGEAGPQGDQGREGPVGVPGDPGEAGPIGPKGYRGDEGPPGSEGARGAPGPAGPPGDPGLMGERGEDGPAGNGTEGFPGFPGYPGNRGAPGINGTKGYPGLKGDEGEAGDPGDDNNDIAPRGVKGAKGYRGPEGPQGPPGHQGPPGPDECEILDIIMKMCSCCECKCGPIDLLFVLDSSESIGLQNFEIAKDFVVKVIDRLSRDELVKFEPGQSYAGVVQYSHSQMQEHVSLRSPSIRNVQELKEAIKSLQWMAGGTFTGEALQYTRDQLLPPSPNNRIALVITDGRSDTQRDTTPLNVLCSPGIQVVSVGIKDVFDFIPGSDQLNVISCQGLAPSQGRPGLSLVKENYAELLEDAFLKNVTAQICIDKKCPDYTCPITFSSPADITILLDGSASVGSHNFDTTKRFAKRLAERFLTAGRTDPAHDVRVAVVQYSGTGQQRPERASLQFLQNYTALASAVDAMDFINDATDVNDALGYVTRFYREASSGAAKKRLLLFSDGNSQGATPAAIEKAVQEAQRAGIEIFVVVVGRQVNEPHIRVLVTGKTAEYDVAYGESHLFRVPSYQALLRGVFHQTVSRKVALG

SEQ ID NO: 222 - protein, 1019 aa, Homo sapiens
MLQGTCSVLLLWGILGAIQAQQQEVISPDTTERNNNCPEKTDCPIHVYFVLDTSESVTMQSPTDILLFHMKQFVPQFISQLQNEFYLDQVALSWRYGGLHFSDQVEVFSPPGSDRASFIKNLQGISSFRRGTFTDCALANMTEQIRQDRSKGTVHFAVVITDGHVTGSPCGGIKLQAERAREEGIRLFAVAPNQNLKEQGLRDIASTPHELYRNDYATMLPDSTEIDQDTINRIIKVMKHEAYGECYKVSCLEIPGPSGPKGYRGQKGAKGNMGEPGEPGQKGRQGDPGIEGPIGFPGPKGVPGFKGEKGEFGADGRKGAPGLAGKNGTDGQKGKLGRIGPPGCKGDPGNRGPDGYPGEAGSPGERGDQGGKGDPGRPGRRGPPGEIGAKGSKGYQGNSGAPGSPGVKGAKGGPGPRGPKGEPGRRGDPGTKGSPGSDGPKGEKGDPGPEGPRGLAGEVGNKGAKGDRGLPGPRGPQGALGEPGKQGSRGDPGDAGPRGDSGQPGPKGDPGRPGFSYPGPRGAPGEKGEPGPRGPEGGRGDFGLKGEPGRKGEKGEPADPGPPGEPGPRGPRGVPGPEGEPGPPGDPGLTECDVMTYVRETCGCCDCEKRCGALDVVFVIDSSESIGYTNFTLEKNFVINVVNRLGAIAKDPKSETGTRVGVVQYSHEGTFEAIQLDDERIDSLSSFKEAVKNLEWIAGGTWTPSALKFAYDRLIKESRRQKTRVFAVVITDGRHDPRDDDLNLRALCDRDVTVTAIGIGDMFHEKHESENLYSIACDKPQQVRNMTLFSDLVAEKFIDDMEDVLCPDPQIVCPDLPCQTELSVAQCTQRPVDIVFLLDGSERLGEQNFHKARRFVEQVARRLTLARRDDDPLNARVALLQFGGPGEQQVAFPLSHNLTAIHEALETTQYLNSFSHVGAGVVHAINAIVRSPRGGARRHAELSFVFLTDGVTGNDSLHESAHSMRKQNVVPTVLALGSDVDMDVLTTLSLGDRAAVFHEKDYDSLAQPGFFDRFIRWIC

SEQ ID NO: 223 - protein, 918 aa, Homo sapiens
MLQGTCSVLLLWGILGAIQAQQQEVISPDTTERNNNCPEKTDCPIHVYFVLDTSESVTMQSPTDILLFHMKQFVPQFISQLQNEFYLDQVALSWRYGGLHFSDQVEVFSPPGSDRASFIKNLQGISSFRRGTFTDCALANMTEQIRQDRSKGTVHFAVVITDGHVTGSPCGGIKLQAERAREEGIRLFAVAPNQNLKEQGLRDIASTPHELYRNDYATMLPDSTEIDQDTINRIIKVMKHEAYGECYKVSCLEIPGPSGPKGYRGQKGAKGNMGEPGEPGQKGRQGDPGIEGPIGFPGPKGVPGFKGEKGEFGADGRKGAPGLAGKNGTDGQKGKLGRIGPPGCKGDPGNRGPDGYPGEAGSPGERGDQGGKGDPGRPGRRGPPGEIGAKGSKGYQGNSGAPGSPGVKGAKGGPGPRGPKGEPGRRGDPGTKGSPGSDGPKGEKGDPGPEGPRGLAGEVGNKGAKGDRGLPGPRGPQGALGEPGKQGSRGDPGDAGPRGDSGQPGPKGDPGRPGFSYPGPRGAPGEKGEPGPRGPEGGRGDFGLKGEPGRKGEKGEPADPGPPGEPGPRGPRGVPGPEGEPGPPGDPGLTECDVMTYVRETCGCCDCEKRCGALDVVFVIDSSESIGYTNFTLEKNFVINVVNRLGAIAKDPKSETGTRVGVVQYSHEGTFEAIQLDDERIDSLSSFKEAVKNLEWIAGGTWTPSALKFAYDRLIKESRRQKTRVFAVVITDGRHDPRDDDLNLRALCDRDVTVTAIGIGDMFHEKHESENLYSIACDKPQQVRNMTLFSDLVAEKFIDDMEDVLCPDPQIVCPDLPCQTDAPWPGGEPPVTFLRTEEGPDATFPRTIPLIQQLLNATELTQDPAAYSQLVAVLVYTAERAKFATGVERQDWMELFIDTFKLVHRDIVGDPETALALC

SEQ ID NO: 224 - protein, 828 aa, Homo sapiens
MLQGTCSVLLLWGILGAIQAQQQEVISPDTTERNNNCPEKTDCPIHVYFVLDTSESVTMQSPTDILLFHMKQFVPQFISQLQNEFYLDQVALSWRYGGLHFSDQVEVFSPPGSDRASFIKNLQGISSFRRGTFTDCALANMTEQIRQDRSKGTVHFAVVITDGHVTGSPCGGIKLQAERAREEGIRLFAVAPNQNLKEQGLRDIASTPHELYRNDYATMLPDSTEIDQDTINRIIKVMKHEAYGECYKVSCLEIPGPSGPKGYRGQKGAKGNMGEPGEPGQKGRQGDPGIEGPIGFPGPKGVPGFKGEKGEFGADGRKGAPGLAGKNGTDGQKGKLGRIGPPGCKGDPGNRGPDGYPGEAGSPGERGDQGGKGDPGRPGRRGPPGEIGAKGSKGYQGNSGAPGSPGVKGAKGGPGPRGPKGEPGRRGDPGTKGSPGSDGPKGEKGDPGPEGPRGLAGEVGNKGAKGDRGLPGPRGPQGALGEPGKQGSRGDPGDAGPRGDSGQPGPKGDPGRPGFSYPGPRGAPGEKGEPGPRGPEGGRGDFGLKGEPGRKGEKGEPADPGPPGEPGPRGPRGVPGPEGEPGPPGDPGLTECDVMTYVRETCGCCDCEKRCGALDVVFVIDSSESIGYTNFTLEKNFVINVVNRLGAIAKDPKSETGTRVGVVQYSHEGTFEAIQLDDERIDSLSSFKEAVKNLEWIAGGTWTPSALKFAYDRLIKESRRQKTRVFAVVITDGRHDPRDDDLNLRALCDRDVTVTAIGIGDMFHEKHESENLYSIACDKPQQVRNMTLFSDLVAEKFIDDMEDVLCPDPQIVCPDLPCQTGLDGAVLC

SEQ ID NO: 225 - protein, 2944 aa, Homo sapiens
MTLRLLVAALCAGILAEAPRVRAQHRERVTCTRLYAADIVFLLDGSSSIGRSNFREVRSFLEGLVLPFSGAASAQGVRFATVQYSDDPRTEFGLDALGSGGDVIRAIRELSYKGGNTRTGAAILHVADHVFLPQLARPGVPKVCILITDGKSQDLVDTAAQRLKGQGVKLFAVGIKNADPEELKRVASQPTSDFFFFVNDFSILRTLLPLVSRRVCTTAGGVPVTRPPDDSTSAPRDLVLSEPSSQSLRVQWTAASGPVTGYKVQYTPLTGLGQPLPSERQEVNVPAGETSVRLRGLRPLTEYQVTVIALYANSIGEAVSGTARTTALEGPELTIQNTTAHSLLVAWRSVPGATGYRVTWRVLSGGPTQQQELGPGQGSVLLRDLEPGTDYEVTVSTLFGRSVGPATSLMARTDASVEQTLRPVILGPTSILLSWNLVPEARGYRLEWRRETGLEPPQKVVLPSDVTRYQLDGLQPGTEYRLTLYTLLEGHEVATPATVVPTGPELPVSPVTDLQATELPGQRVRVSWSPVPGATQYRIIVRSTQGVERTLVLPGSQTAFDLDDVQAGLSYTVRVSARVGPREGSASVLTVRREPETPLAVPGLRVVVSDATRVRVAWGPVPGASGFRISWSTGSGPESSQTLPPDSTATDITGLQPGTTYQVAVSVLRGREEGPAAVIVARTDPLGPVRTVHVTQASSSSVTITWTRVPGATGYRVSWHSAHGPEKSQLVSGEATVAELDGLEPDTEYTVHVRAHVAGVDGPPASVVVRTAPEPVGRVSRLQILNASSDVLRITWVGVTGATAYRLAWGRSEGGPMRHQILPGNTDSAEIRGLEGGVSYSVRVTALVGDREGTPVSIVVTTPPEAPPALGTLHVVQRGEHSLRLRWEPVPRAQGFLLHWQPEGGQEQSRVLGPELSSYHLDGLEPATQYRVRLSVLGPAGEGPSAEVTARTESPRVPSIELRVVDTSIDSVTLAWTPVSRASSYILSWRPLRGPGQEVPGSPQTLPGISSSQRVTGLEPGVSYIFSLTPVLDGVRGPEASVTQTPVCPRGLADVVFLPHATQDNAHRAEATRRVLERLVLALGPLGPQAVQVGLLSYSHRPSPLFPLNGSHDLGIILQRIRDMPYMDPSGNNLGTAVVTAHRYMLAPDAPGRRQHVPGVMVLLVDEPLRGDIFSPIREAQASGLNVVMLGMAGADPEQLRRLAPGMDSVQTFFAVDDGPSLDQAVSGLATALCQASFTTQPRPEPCPVYCPKGQKGEPGEMGLRGQVGPPGDPGLPGRTGAPGPQGPPGSATAKGERGFPGADGRPGSPGRAGNPGTPGAPGLKGSPGLPGPRGDPGERGPRGPKGEPGAPGQVIGGEGPGLPGRKGDPGPSGPPGPRGPLGDPGPRGPPGLPGTAMKGDKGDRGERGPPGPGEGGIAPGEPGLPGLPGSPGPQGPVGPPGKKGEKGDSEDGAPGLPGQPGSPGEQGPRGPPGAIGPKGDRGFPGPLGEAGEKGERGPPGPAGSRGLPGVAGRPGAKGPEGPPGPTGRQGEKGEPGRPGDPAVVGPAVAGPKGEKGDVGPAGPRGATGVQGERGPPGLVLPGDPGPKGDPGDRGPIGLTGRAGPPGDSGPPGEKGDPGRPGPPGPVGPRGRDGEVGEKGDEGPPGDPGLPGKAGERGLRGAPGVRGPVGEKGDQGDPGEDGRNGSPGSSGPKGDRGEPGPPGPPGRLVDTGPGAREKGEPGDRGQEGPRGPKGDPGLPGAPGERGIEGFRGPPGPQGDPGVRGPAGEKGDRGPPGLDGRSGLDGKPGAAGPSGPNGAAGKAGDPGRDGLPGLRGEQGLPGPSGPPGLPGKPGEDGKPGLNGKNGEPGDPGEDGRKGEKGDSGASGREGRDGPKGERGAPGILGPQGPPGLPGPVGPPGQGFPGVPGGTGPKGDRGETGSKGEQGLPGERGLRGEPGSVPNVDRLLETAGIKASALREIVETWDESSGSFLPVPERRRGPKGDSGEQGPPGKEGPIGFPGERGLKGDRGDPGPQGPPGLALGERGPPGPSGLAGEPGKPGIPGLPGRAGGVGEAGRPGERGERGEKGERGEQGRDGPPGLPGTPGPPGPPGPKVSVDEPGPGLSGEQGPPGLKGAKGEPGSNGDQGPKGDRGVPGIKGDRGEPGPRGQDGNPGLPGERGMAGPEGKPGLQGPRGPPGPVGGHGDPGPPGAPGLAGPAGPQGPSGLKGEPGETGPPGRGLTGPTGAVGLPGPPGPSGLVGPQGSPGLPGQVGETGKPGAPGRDGASGKDGDRGSPGVPGSPGLPGPVGPKGEPGPTGAPGQAVVGLPGAKGEKGAPGGLAGDLVGEPGAKGDRGLPGPRGEKGEAGRAGEPGDPGEDGQKGAPGPKGFKGDPGVGVPGSPGPPGPPGVKGDLGLPGLPGAPGVVGFPGQTGPRGEMGQPGPSGERGLAGPPGREGIPGPLGPPGPPGSVGPPGASGLKGDKGDPGVGLPGPRGERGEPGIRGEDGRPGQEGPRGLTGPPGSRGERGEKGDVGSAGLKGDKGDSAVILGPPGPRGAKGDMGERGPRGLDGDKGPRGDNGDPGDKGSKGEPGDKGSAGLPGLRGLLGPQGQPGAAGIPGDPGSPGKDGVPGIRGEKGDVGFMGPRGLKGERGVKGACGLDGEKGDKGEAGPPGRPGLAGHKGEMGEPGVPGQSGAPGKEGLIGPKGDRGFDGQPGPKGDQGEKGERGTPGIGGFPGPSGNDGSAGPPGPPGSVGPRGPEGLQGQKGERGPPGERVVGAPGVPGAPGERGEQGRPGPAGPRGEKGEAALTEDDIRGFVRQEMSQHCACQGQFIASGSRPLPSYAADTAGSQLHAVPVLRVSHAEEEERVPPEDDEYSEYSEYSVEEYQDPEAPWDSDDPCSLPLDEGSCTAYTLRWYHRAVTGSTEACHPFVYGGCGGNANRFGTREACERRCPPRVVQSQGTGTAQD

SEQ ID NO: 226 - protein, 744 aa, Homo sapiens
MAVLPGPLQLLGVLLTISLSSIRLIQAGAYYGIKPLPPQIPPQMPPQIPQYQPLGQQVPHMPLAKDGLAMGKEMPHLQYGKEYPHLPQYMKEIQPAPRMGKEAVPKKGKEIPLASLRGEQGPRGEPGPRGPPGPPGLPGHGIPGIKGKPGPQGYPGVGKPGMPGMPGKPGAMGMPGAKGEIGQKGEIGPMGIPGPQGPPGPHGLPGIGKPGGPGLPGQPGPKGDRGPKGLPGPQGLRGPKGDKGFGMPGAPGVKGPPGMHGPPGPVGLPGVGKPGVTGFPGPQGPLGKPGAPGEPGPQGPIGVPGVQGPPGIPGIGKPGQDGIPGQPGFPGGKGEQGLPGLPGPPGLPGIGKPGFPGPKGDRGMGGVPGALGPRGEKGPIGAPGIGGPPGEPGLPGIPGPMGPPGAIGFPGPKGEGGIVGPQGPPGPKGEPGLQGFPGKPGFLGEVGPPGMRGLPGPIGPKGEAGQKGVPGLPGVPGLLGPKGEPGIPGDQGLQGPPGIPGIGGPSGPIGPPGIPGPKGEPGLPGPPGFPGIGKPGVAGLHGPPGKPGALGPQGQPGLPGPPGPPGPPGPPAVMPPTPPPQGEYLPDMGLGIDGVKPPHAYGAKKGKNGGPAYEMPAFTAELTAPFPPVGAPVKFNKLLYNGRQNYNPQTGIFTCEVPGVYYFAYHVHCKGGNVWVALFKNNEPVMYTYDEYKKGFLDQASGSAVLLLRPGDRVFLQMPSEQAAGLYAGQYVHSSFSGYLLYPM

SEQ ID NO: 227 - protein, 703 aa, Homo sapiens
MLGTLTPLSSLLLLLLVLVLGCGPRASSGGGAGGAAGYAPVKYIQPMQKGPVGPPFREGKGQYLEMPLPLLPMDLKGEPGPPGKPGPRGPPGPPGFPGKPGMGKPGLHGQPGPAGPPGFSRMGKAGPPGLPGKVGPPGQPGLRGEPGIRGDQGLRGPPGPPGLPGPSGITIPGKPGAQGVPGPPGFQGEPGPQGEPGPPGDRGLKGDNGVGQPGLPGAPGQGGAPGPPGLPGPAGLGKPGLDGLPGAPGDKGESGPPGVPGPRGEPGAVGPKGPPGVDGVGVPGAAGLPGPQGPSGAKGEPGTRGPPGLIGPTGYGMPGLPGPKGDRGPAGVPGLLGDRGEPGEDGEPGEQGPQGLGGPPGLPGSAGLPGRRGPPGPKGEAGPGGPPGVPGIRGDQGPSGLAGKPGVPGERGLPGAHGPPGPTGPKGEPGFTGRPGGPGVAGALGQKGDLGLPGQPGLRGPSGIPGLQGPAGPIGPQGLPGLKGEPGLPGPPGEGRAGEPGTAGPTGPPGVPGSPGITGPPGPPGPPGPPGAPGAFDETGIAGLHLPNGGVEGAVLGKGGKPQFGLGELSAHATPAFTAVLTSPFPASGMPVKFDRTLYNGHSGYNPATGIFTCPVGGVYYFAYHVHVKGTNVWVALYKNNVPATYTYDEYKKGYLDQASGGAVLQLRPNDQVWVQMPSDQANGLYSTEYIHSSFSGFLLCPT

SEQ ID NO: 228 - protein, 638 aa, Homo sapiens
MPLPLLPMDLKGEPGPPGKPGPRGPPGPPGFPGKPGMGKPGLHGQPGPAGPPGFSRMGKAGPPGLPGKVGPPGQPGLRGEPGIRGDQGLRGPPGPPGLPGPSGITIPGKPGAQGVPGPPGFQGEPGPQGEPGPPGDRGLKGDNGVGQPGLPGAPGQGGAPGPPGLPGPAGLGKPGLDGLPGAPGDKGESGPPGVPGPRGEPGAVGPKGPPGVDGVGVPGAAGLPGPQGPSGAKGEPGTRGPPGLIGPTGYGMPGLPGPKGDRGPAGVPGLLGDRGEPGEDGEPGEQGPQGLGGPPGLPGSAGLPGRRGPPGPKGEAGPGGPPGVPGIRGDQGPSGLAGKPGVPGERGLPGAHGPPGPTGPKGEPGFTGRPGGPGVAGALGQKGDLGLPGQPGLRGPSGIPGLQGPAGPIGPQGLPGLKGEPGLPGPPGEGRAGEPGTAGPTGPPGVPGSPGITGPPGPPGPPGPPGAPGAFDETGIAGLHLPNGGVEGAVLGKGGKPQFGLGELSAHATPAFTAVLTSPFPASGMPVKFDRTLYNGHSGYNPATGIFTCPVGGVYYFAYHVHVKGTNVWVALYKNNVPATYTYDEYKKGYLDQASGGAVLQLRPNDQVWVQMPSDQANGLYSTEYIHSSFSGFLLCPT

SEQ ID NO: 229 - protein, 1899 aa, Homo sapiens
MRSRLPPALAALGAALLLSSIEAEGMECLTRAEADIVLLVDGSWSIGRANFRTVRSFISRIVEVFDIGPKRVQIALAQYSGDPRTEWQLNAHRDKKSLLQAVANLPYKGGNTLTGMALNFIRQQNFRTQAGMRPRARKIGVLITDGKSQDDVEAPSKKLKDEGVELFAIGIKNADEVELKMIATDPDDTHAYNVADFESLSRIVDDLTINLCNSVKGPGDLEAPSNLVISERTHRSFRVSWTPPSDSVDRYKVEYYPVSGGKRQEFYVSRMETSTVLKDLKPETEYVVNVYSVVEDEYSEPLKGTEKTLPVPVVSLNIYDVGPTTMHVQWQPVGGATGYILSYKPVKDTEPTRPKEVRLGPTVNDMQLTDLVPNTEYAVTVQAVLHDLTSEPVTVREVTLPLPRPQDLKLRDVTHSTMNVFWEPVPGKVRKYIVRYKTPEEDVKEVEVDRSETSTSLKDLFSQTLYTVSVSAVHDEGESPPVTAQETTRPVPAPTNLKITEVTSEGFRGTWDHGASDVSLYRITWAPFGSSDKMETILNGDENTLVFENLNPNTIYEVSITAIYPDESESDDLIGSERTLPILTTQAPKSGPRNLQVYNATSNSLTVKWDPASGRVQKYRITYQPSTGEGNEQTTTIGGRQNSVVLQKLKPDTPYTITVSSLYPDGEGGRMTGRGKTKPLNTVRNLRVYDPSTSTLNVRWDHAEGNPRQYKLFYAPAAGGPEELVPIPGNTNYAILRNLQPDTSYTVTVVPVYTEGDGGRTSDTGRTLMRGLARNVQVYNPTPNSLDVRWDPAPGPVLQYRVVYSPVDGTRPSESIVVPGNTRMVHLERLIPDTLYSVNLVALYSDGEGNPSPAQGRTLPRSGPRNLRVFGETTNSLSVAWDHADGPVQQYRIIYSPTVGDPIDEYTTVPGRRNNVILQPLQPDTPYKITVIAVYEDGDGGHLTGNGRTVGLLPPQNIHISDEWYTRFRVSWDPSPSPVLGYKIVYKPVGSNEPMEAFVGEMTSYTLHNLNPSTTYDVNVYAQYDSGLSVPLTDQGTTLYLNVTDLKTYQIGWDTFCVKWSPHRAATSYRLKLSPADGTRGQEITVRGSETSHCFTGLSPDTDYGVTVFVQTPNLEGPGVSVKEHTTVKPTEAPTEPPTPPPPPTIPPARDVCKGAKADIVFLTDASWSIGDDNFNKVVKFIFNTVGGFDEISPAGIQVSFVQYSDEVKSEFKLNTYNDKALALGALQNIRYRGGNTRTGKALTFIKEKVLTWESGMRKNVPKVLVVVTDGRSQDEVKKAALVIQQSGFSVFVVGVADVDYNELANIASKPSERHVFIVDDFESFEKIEDNLITFVCETATSSCPLIYLDGYTSPGFKMLEAYNLTEKNFASVQGVSLESGSFPSYSAYRIQKNAFVNQPTADLHPNGLPPSYTIILLFRLLPETPSDPFAIWQITDRDYKPQVGVIADPSSKTLSFFNKDTRGEVQTVTFDTEEVKTLFYGSFHKVHIVVTSKSVKIYIDCYEIIEKDIKEAGNITTDGYEILGKLLKGERKSAAFQIQSFDIVCSPVWTSRDRCCDIPSRRDEGKCPAFPNSCTCTQDSVGPPGPPGPAGGPGAKGPRGERGISGAIGPPGPRGDIGPPGPQGPPGPQGPNGLSIPGEQGRQGMKGDAGEPGLPGRTGTPGLPGPPGPMGPPGDRGFTGKDGAMGPRGPPGPPGSPGSPGVTGPSGKPGKPGDHGRPGPSGLKGEKGDRGDIASQNMMRAVARQVCEQLISGQMNRFNQMLNQIPNDYQSSRNQPGPPGPPGPPGSAGARGEPGPGGRPGFPGTPGMQGPPGERGLPGEKGERGTGSSGPRGLPGPPGPQGESRTGPPGSTGSRGPPGPPGRPGNSGIRGPPGPPGYCDSSQCASIPYNGQGYPGSG

SEQ ID NO: 230 - protein, 3063 aa, Homo sapiens
MRSRLPPALAALGAALLLSSIEAEVDPPSDLNFKIIDENTVHMSWAKPVDPIVGYRITVDPTTDGPTKEFTLSASTTETLLSELVPETEYVVTITSYDEVEESVPVIGQLTIQTGSSTKPVEKKPGKTEIQKCSVSAWTDLVFLVDGSWSVGRNNFKYILDFIAALVSAFDIGEEKTRVGVVQYSSDTRTEFNLNQYYQRDELLAAIKKIPYKGGNTMTGDAIDYLVKNTFTESAGARVGFPKVAIIITDGKSQDEVEIPARELRNVGVEVFSLGIKAADAKELKQIASTPSLNHVFNVANFDAIVDIQNEIISQVCSGVDEQLGELVSGEEVVEPPSNLIAMEVSSKYVKLNWNPSPSPVTGYKVILTPMTAGSRQHALSVGPQTTTLSVRDLSADTEYQISVSAMKGMTSSEPISIMEKTQPMKVQVECSRGVDIKADIVFLVDGSYSIGIANFVKVRAFLEVLVKSFEISPNRVQISLVQYSRDPHTEFTLKKFTKVEDIIEAINTFPYRGGSTNTGKAMTYVREKIFVPSKGSRSNVPKVMILITDGKSSDAFRDPAIKLRNSDVEIFAVGVKDAVRSELEAIASPPAETHVFTVEDFDAFQRISFELTQSICLRIEQELAAIKKKAYVPPKDLSFSEVTSYGFKTNWSPAGENVFSYHITYKEAAGDDEVTVVEPASSTSVVLSSLKPETLYLVNVTAEYEDGFSIPLAGEETTEEVKGAPRNLKVTDETTDSFKITWTQAPGRVLRYRIIYRPVAGGESREVTTPPNQRRRTLENLIPDTKYEVSVIPEYFSGPGTPLTGNAATEEVRGNPRDLRVSDPTTSTMKLSWSGAPGKVKQYLVTYTPVAGGETQEVTVRGDTTNTVLQGLKEGTQYALSVTALYASGAGDALFGEGTTLEERGSPQDLVTKDITDTSIGAYWTSAPGMVRGYRVSWKSLYDDVDTGEKNLPEDAIHTMIENLQPETKYRISVFATYSSGEGEPLTGDATTELSQDSKTLKVDEETENTMRVTWKPAPGKVVNYRVVYRPHGRGKQMVAKVPPTVTSTVLKRLQPQTTYDITVLPIYKMGEGKLRQGSGTTASRFKSPRNLKTSDPTMSSFRVTWEPAPGEVKGYKVTFHPTGDDRRLGELVVGPYDNTVVLEELRAGTTYKVNVFGMFDGGESSPLVGQEMTTLSDTTVMPILSSGMECLTRAEADIVLLVDGSWSIGRANFRTVRSFISRIVEVFDIGPKRVQIALAQYSGDPRTEWQLNAHRDKKSLLQAVANLPYKGGNTLTGMALNFIRQQNFRTQAGMRPRARKIGVLITDGKSQDDVEAPSKKLKDEGVELFAIGIKNADEVELKMIATDPDDTHAYNVADFESLSRIVDDLTINLCNSVKGPGDLEAPSNLVISERTHRSFRVSWTPPSDSVDRYKVEYYPVSGGKRQEFYVSRMETSTVLKDLKPETEYVVNVYSVVEDEYSEPLKGTEKTLPVPVVSLNIYDVGPTTMHVQWQPVGGATGYILSYKPVKDTEPTRPKEVRLGPTVNDMQLTDLVPNTEYAVTVQAVLHDLTSEPVTVREVTLPLPRPQDLKLRDVTHSTMNVFWEPVPGKVRKYIVRYKTPEEDVKEVEVDRSETSTSLKDLFSQTLYTVSVSAVHDEGESPPVTAQETTRPVPAPTNLKITEVTSEGFRGTWDHGASDVSLYRITWAPFGSSDKMETILNGDENTLVFENLNPNTIYEVSITAIYPDESESDDLIGSERTLPILTTQAPKSGPRNLQVYNATSNSLTVKWDPASGRVQKYRITYQPSTGEGNEQTTTIGGRQNSVVLQKLKPDTPYTITVSSLYPDGEGGRMTGRGKTKPLNTVRNLRVYDPSTSTLNVRWDHAEGNPRQYKLFYAPAAGGPEELVPIPGNTNYAILRNLQPDTSYTVTVVPVYTEGDGGRTSDTGRTLMRGLARNVQVYNPTPNSLDVRWDPAPGPVLQYRVVYSPVDGTRPSESIVVPGNTRMVHLERLIPDTLYSVNLVALYSDGEGNPSPAQGRTLPRSGPRNLRVFGETTNSLSVAWDHADGPVQQYRIIYSPTVGDPIDEYTTVPGRRNNVILQPLQPDTPYKITVIAVYEDGDGGHLTGNGRTVGLLPPQNIHISDEWYTRFRVSWDPSPSPVLGYKIVYKPVGSNEPMEAFVGEMTSYTLHNLNPSTTYDVNVYAQYDSGLSVPLTDQGTTLYLNVTDLKTYQIGWDTFCVKWSPHRAATSYRLKLSPADGTRGQEITVRGSETSHCFTGLSPDTDYGVTVFVQTPNLEGPGVSVKEHTTVKPTEAPTEPPTPPPPPTIPPARDVCKGAKADIVFLTDASWSIGDDNFNKVVKFIFNTVGGFDEISPAGIQVSFVQYSDEVKSEFKLNTYNDKALALGALQNIRYRGGNTRTGKALTFIKEKVLTWESGMRKNVPKVLVVVTDGRSQDEVKKAALVIQQSGFSVFVVGVADVDYNELANIASKPSERHVFIVDDFESFEKIEDNLITFVCETATSSCPLIYLDGYTSPGFKMLEAYNLTEKNFASVQGVSLESGSFPSYSAYRIQKNAFVNQPTADLHPNGLPPSYTIILLFRLLPETPSDPFAIWQITDRDYKPQVGVIADPSSKTLSFFNKDTRGEVQTVTFDTEEVKTLFYGSFHKVHIVVTSKSVKIYIDCYEIIEKDIKEAGNITTDGYEILGKLLKGERKSAAFQIQSFDIVCSPVWTSRDRCCDIPSRRDEGKCPAFPNSCTCTQDSVGPPGPPGPAGGPGAKGPRGERGISGAIGPPGPRGDIGPPGPQGPPGPQGPNGLSIPGEQGRQGMKGDAGEPGLPGRTGTPGLPGPPGPMGPPGDRGFTGKDGAMGPRGPPGPPGSPGSPGVTGPSGKPGKPGDHGRPGPSGLKGEKGDRGDIASQNMMRAVARQVCEQLISGQMNRFNQMLNQIPNDYQSSRNQPGPPGPPGPPGSAGARGEPGPGGRPGFPGTPGMQGPPGERGLPGEKGERGTGSSGPRGLPGPPGPQGESRTGPPGSTGSRGPPGPPGRPGNSGIRGPPGPPGYCDSSQCASIPYNGQGYPGSG

SEQ ID NO: 231 - protein, 477 aa, Homo sapiens
MGLTGPPGQPGPQGQKGEKGQCGEYPHRLLPLLNSVRLAPPPVIKRRTFQGEQSQASIQGPPGPPGPPGPSGPLGHPGLPGPMGPPGLPGPPGPKGDPGIQGYHGRKGERGMPGMPGKHGAKGAPGIAVAGMKGEPGIPGTKGEKGAEGSPGLPGLLGQKGEKGDAGNSIGGGRGEPGPPGLPGPPGPKGEAGVDGQVGPPGQPGDKGERGAAGEQGPDGPKGSKGEPGKGEMVDYNGNINEALQEIRTLALMGPPGLPGQIGPPGAPGIPGQKGEIGLPGPPGHDGEKGPRGKPGDMGPPGPQGPPGKDGPPGVKGENGHPGSPGEKGEKGETGQAGSPVPGLPGPEGPPGPPGLQGVPGPKGEAGLDGAKGEKGFQGEKGDRGPLGLPGTPGPIGVPGPAGPKGERGSKGDPGMTGPTGAAGLPGLHGPPGDKGNRGHRGFKGEKGEPGLPGLDGLDAPCPLGEDGLPVQGCWNK

SEQ ID NO: 232 - protein, 651 aa, Homo sapiens
MVAERTHKAAATGARGPGELGAPGTVALVAARAERGARLPSPGSCGLLTLALCSLALSLLAHFRTAELQARVLRLEAERGEQQMETAILGRVNQLLDEKWKLHSRRRREAPKTSPGCNCPPGPPGPTGRPGLPGVKGQPGEKGSPGDAGLSIIGPRGPPGQPGTRGFPGFPGPIGLDGKPGHPGPKGDMGLTGPPGQPGPQGQKGEKGQCGEYPHRLLPLLNSVRLAPPPVIKRRTFQGEQSQASIQGPPGPPGPPGPSGPLGHPGLPGPMGPPGLPGPPGPKGDPGIQGYHGRKGERGMPGMPGKHGAKGAPGIAVAGMKGEPGIPGTKGEKGAEGSPGLPGLLGQKGEKGDAGNSIGGGRGEPGPPGLPGPPGPKGEAGVDGQVGPPGQPGDKGERGAAGEQGPDGPKGSKGEPGKGEMVDYNGNINEALQEIRTLALMGPPGLPGQIGPPGAPGIPGQKGEIGLPGPPGHDGEKGPRGKPGDMGPPGPQGPPGKDGPPGVKGENGHPGSPGEKGEKGETGQAGSPGLQGVPGPKGEAGLDGAKGEKGFQGEKGDRGPLGLPGTPGPIGVPGPAGPKGERGSKGDPGMTGPTGAAGLPGLHGPPGDKGNRGHRGFKGEKGEPGLPGLDGLDAPCPLGEDGLPVQGCWNK

SEQ ID NO: 233 - protein, 728 aa, Homo sapiens
MVAERTHKAAATGARGPGELGAPGTVALVAARAERGARLPSPGSCGLLTLALCSLALSLLAHFRTAELQARVLRLEAERGEQQMETAILGRVNQLLDEKWKLHSRRRREAPKTSPGCNCPPGPPGPTGRPGLPGDKGAIGMPGRVGVKGQPGEKGSPGDAGLSIIGPRGPPGQPGTRGFPGFPGPIGLDGKPGHPGPKGDMGLTGPPGQPGPQGQKGEKGQCGEYPHRLLPLLNSVRLAPPPVIKRRTFQGEQSQASIQGPPGPPGPPGPSGPLGHPGLPGPMGPPGLPGPPGPKGDPGIQGYHGRKGERGMPGMPGKHGAKGAPGIAVAGMKGEPGIPGTKGDPGAEGKPGPPGLLGKRGQRGEKGAEGSPGLPGLLGQKGEKGDAGNSIGGGRGEPGPPGLPGPPGPKGEAGVDGQVGPPGQPGDKGERGAAGEQGPDGPKGSKGEPGKGEMVDYNGNINEALQEIRTLALMGPPGLPGQIGPPGAPGIPGQKGEIGLPGPPGHDGEKGPRGKPGDMGPPGPQGPPGKDGPPGVKGENGHPGSPGEKGEKGETGQAGSPGEKGEAGEKGNPGAEVPGLPGPEGPPGPPGLQGVPGPKGEAGLDGAKGEKGFQGEKGDRGPLGLPGASGLDGRPGPPGTPGPIGVPGPAGPKGERGSKGDPGMTGPTGAAGLPGLHGPPGDKGNRGERGKKGSRGPKGDKGDQGAPGLDAPCPLGEDGLPVQGCWNK

SEQ ID NO: 234 - protein, 680 aa, Homo sapiens
MVAERTHKAAATGARGPGELGAPGTVALVAARAERGARLPSPGSCGLLTLALCSLALSLLAHFRTAELQARVLRLEAERGEQQMETAILGRVNQLLDEKWKLHSRRRREAPKTSPGCNCPPGPPGPTGRPGLPGDKGAIGMPGRVGVKGQPGEKGSPGDAGLSIIGPRGPPGQPGTRGFPGFPGPIGLDGKPGHPGPKGDMGLTGPPGQPGPQGQKGEKGQCGEYPHRLLPLLNSVRLAPPPVIKRRTFQGEQSQASIQGPPGPPGPPGPSGPLGHPGLPGPMGPPGLPGPPGPKGDPGIQGYHGRKGERGMPGMPGKHGAKGAPGIAVAGMKGEPGIPGTKGEKGAEGSPGLPGLLGQKGEKGDAGNSIGGGRGEPGPPGLPGPPGPKGEAGVDGQVGPPGQPGDKGERGAAGEQGPDGPKGSKGEPGKGEMVDYNGNINEALQEIRTLALMGPPGLPGQIGPPGAPGIPGQKGEIGLPGPPGHDGEKGPRGKPGDMGPPGPQGPPGKDGPPGVKGENGHPGSPGEKGEKGETGQAGSPVPGLPGPEGPPGPPGLQGVPGPKGEAGLDGAKGEKGFQGEKGDRGPLGLPGTPGPIGVPGPAGPKGERGSKGDPGMTGPTGAAGLPGLHGPPGDKGNRGERGKKGSRGPKGDKGDQGAPGLDAPCPLGEDGLPVQGCWNK

SEQ ID NO: 235 - protein, 657 aa, Homo sapiens
MVAERTHKAAATGARGPGELGAPGTVALVAARAERGARLPSPGSCGLLTLALCSLALSLLAHFRTAELQARVLRLEAERGEQQMETAILGRVNQLLDEKWKLHSRRRREAPKTSPGCNCPPGPPGSPGDAGLSIIGPRGPPGQPGTRGFPGFPGPIGLDGKPGHPGPKGDMGLTGPPGQPGPQGQKGEKGQCGEYPHRLLPLLNSVRLAPPPVIKRRTFQGEQSQASIQGPPGPPGPPGPSGPLGHPGLPGPMGPPGLPGPPGPKGDPGIQGYHGRKGERGMPGMPGKHGAKGAPGIAVAGMKGEPGIPGTKGDPGAEGKPGPPGLLGKRGQRGEKGAEGSPGLPGLLGQKGEKGDAGNSIGGGRGEPGPPGLPGPPGPKGEAGVDGQVGPPGQPGDKGERGAAGEQGPDGPKGSKGEPGKGEMVDYNGNINEALQEIRTLALMGPPGLPGQIGPPGAPGIPGQKGEIGLPGPPGHDGEKGPRGKPGDMGPPGPQGPPGKDGPPGVKGENGHPGSPGEKGEKGETGQAGSPGLQGVPGPKGEAGLDGAKGEKGFQGEKGDRGPLGLPGTPGPIGVPGPAGPKGERGSKGDPGMTGPTGAAGLPGLHGPPGDKGNRGERGKKGSRGPKGDKGDQGAPGLDAPCPLGEDGLPVQGCWNK

SEQ ID NO: 236 - protein, 619 aa, Homo sapiens
MVAERTHKAAATGARGPGELGAPGTVALVAARAERGARLPSPGSCGLLTLALCSLALSLLAHFRTAELQARVLRLEAERGEQQMETAILGRVNQLLDEKWKLHSRRRREAPKTSPGCNCPPGPPGQPGTRGFPGFPGPIGLDGKPGHPGPKGDMGLTGPPGQPGPQGQKGEKGQCGEYPHRLLPLLNSVRLAPPPVIKRRTFQGEQSQASIQGPPGPPGPPGPSGPLGHPGLPGPMGPPGLPGPPGPKGDPGIQGYHGRKGERGMPGMPGKHGAKGAPGIAVAGMKGEPGIPGTKGEKGAEGSPGLPGLLGQKGEKGDAGNSIGGGRGEPGPPGLPGPPGPKGEAGVDGQVGPPGQPGDKGERGAAGEQGPDGPKGSKGEPGKGEMVDYNGNINEALQEIRTLALMGPPGLPGQIGPPGAPGIPGQKGEIGLPGPPGHDGEKGPRGKPGDMGPPGPQGPPGKDGPPGVKGENGHPGSPGEKGEKGETGQAGSPGEKGEAGEKGNPGAEVPGLPGPEGPPGPPGLQGVPGPKGEAGLDGAKGEKGFQGEKGDRGPLGLPGTPGPIGVPGPAGPKGERGSKGDPGMTGPTGAAGLPGLHGPPGDKGNRGEDGLPVQGCWNK

SEQ ID NO: 237 - protein, 625 aa, Homo sapiens
MVAERTHKAAATGARGPGELGAPGTVALVAARAERGARLPSPGSCGLLTLALCSLALSLLAHFRTAELQARVLRLEAERGEQQMETAILGRVNQLLDEKWKLHSRRRREAPKTSPGCNCPPGPPGPTGRPGLPGQPGTRGFPGFPGPIGLDGKPGHPGPKGDMGLTGPPGQPGPQGQKGEKGQCGEYPHRLLPLLNSVRLAPPPVIKRRTFQGEQSQASIQGPPGPPGPPGPSGPLGHPGLPGPMGPPGLPGPPGPKGDPGIQGYHGRKGERGMPGMPGKHGAKGAPGIAVAGMKGEPGIPGTKGEKGAEGSPGLPGLLGQKGEKGDAGNSIGGGRGEPGPPGLPGPPGPKGEAGVDGQVGPPGQPGDKGERGAAGEQGPDGPKGSKGEPGKGEMVDYNGNINEALQEIRTLALMGPPGLPGQIGPPGAPGIPGQKGEIGLPGPPGHDGEKGPRGKPGDMGPPGPQGPPGKDGPPGVKGENGHPGSPGEKGEKGETGQAGSPGLQGVPGPKGEAGLDGAKGEKGFQGEKGDRGPLGLPGTPGPIGVPGPAGPKGERGSKGDPGMTGPTGAAGLPGLHGPPGDKGNRGHRGFKGEKGEPGLPGLDGLDAPCPLGEDGLPVQGCWNK

SEQ ID NO: 238 - protein, 628 aa, Homo sapiens
MVAERTHKAAATGARGPGELGAPGTVALVAARAERGARLPSPGSCGLLTLALCSLALSLLAHFRTAELQARVLRLEAERGEQQMETAILGRVNQLLDEKWKLHSRRRREAPKTSPGCNCPPGPPGQPGTRGFPGFPGPIGLDGKPGHPGPKGDMGLTGPPGQPGPQGQKGEKGQCGEYPHRLLPLLNSVRLAPPPVIKRRTFQGEQSQASIQGPPGPPGPPGPSGPLGHPGLPGPMGPPGLPGPPGPKGDPGIQGYHGRKGERGMPGMPGKHGAKGAPGIAVAGMKGEPGIPGTKGEKGAEGSPGLPGLLGQKGEKGDAGNSIGGGRGEPGPPGLPGPPGPKGEAGVDGQVGPPGQPGDKGERGAAGEQGPDGPKGSKGEPGKGEMVDYNGNINEALQEIRTLALMGPPGLPGQIGPPGAPGIPGQKGEIGLPGPPGHDGEKGPRGKPGDMGPPGPQGPPGKDGPPGVKGENGHPGSPGEKGEKGETGQAGSPGLQGVPGPKGEAGLDGAKGEKGFQGEKGDRGPLGLPGASGLDGRPGPPGTPGPIGVPGPAGPKGERGSKGDPGMTGPTGAAGLPGLHGPPGDKGNRGHRGFKGEKGEPGLPGLDGLDAPCPLGEDGLPVQGCWNK

SEQ ID NO: 239 - protein, 666 aa, Homo sapiens
MVAERTHKAAATGARGPGELGAPGTVALVAARAERGARLPSPGSCGLLTLALCSLALSLLAHFRTAELQARVLRLEAERGEQQMETAILGRVNQLLDEKWKLHSRRRREAPKTSPGCNCPPGPPGPTGRPGLPGDKGAIGMPGRVGVKGQPGEKGSPGDAGLSIIGPRGPPGQPGTRGFPGFPGPIGLDGKPGHPGPKGDMGLTGPPGQPGPQGQKGEKGQCGEYPHRLLPLLNSVRLAPPPVIKRRTFQGEQSQASIQGPPGPPGPPGPSGPLGHPGLPGPMGPPGLPGPPGPKGDPGIQGYHGRKGERGMPGMPGKHGAKGAPGIAVAGMKGEPGIPGTKGEKGAEGSPGLPGLLGQKGEKGDAGNSIGGGRGEPGPPGLPGPPGPKGEAGVDGQVGPPGQPGDKGERGAAGEQGPDGPKGSKGEPGKGEMVDYNGNINEALQEIRTLALMGPPGLPGQIGPPGAPGIPGQKGEIGLPGPPGHDGEKGPRGKPGDMGPPGPQGPPGKDGPPGVKGENGHPGSPGEKGEKGETGQAGSPGLQGVPGPKGEAGLDGAKGEKGFQGEKGDRGPLGLPGTPGPIGVPGPAGPKGERGSKGDPGMTGPTGAAGLPGLHGPPGDKGNRGERGKKGSRGPKGDKGDQGAPGLDAPCPLGEDGLPVQGCWNK

SEQ ID NO: 240 - protein, 684 aa, Homo sapiens
MVAERTHKAAATGARGPGELGAPGTVALVAARAERGARLPSPGSCGLLTLALCSLALSLLAHFRTAELQARVLRLEAERGEQQMETAILGRVNQLLDEKWKLHSRRRREAPKTSPGCNCPPGPPGPTGRPGLPGVKGQPGEKGSPGDAGLSIIGPRGPPGQPGTRGFPGFPGPIGLDGKPGHPGPKGDMGLTGPPGQPGPQGQKGEKGQCGEYPHRLLPLLNSVRLAPPPVIKRRTFQGEQSQASIQGPPGPPGPPGPSGPLGHPGLPGPMGPPGLPGPPGPKGDPGIQGYHGRKGERGMPGMPGKHGAKGAPGIAVAGMKGEPGIPGTKGDPGAEGKPGPPGLLGKRGQRGEKGAEGSPGLPGLLGQKGEKGDAGNSIGGGRGEPGPPGLPGPPGPKGEAGVDGQVGPPGQPGDKGERGAAGEQGPDGPKGSKGEPGKGEMVDYNGNINEALQEIRTLALMGPPGLPGQIGPPGAPGIPGQKGEIGLPGPPGHDGEKGPRGKPGDMGPPGPQGPPGKDGPPGVKGENGHPGSPGEKGEKGETGQAGSPGLQGVPGPKGEAGLDGAKGEKGFQGEKGDRGPLGLPGASGLDGRPGPPGTPGPIGVPGPAGPKGERGSKGDPGMTGPTGAAGLPGLHGPPGDKGNRGHRGFKGEKGEPGLPGLDGLDAPCPLGEDGLPVQGCWNK

SEQ ID NO: 241 - protein, 645 aa, Homo sapiens
MVAERTHKAAATGARGPGELGAPGTVALVAARAERGARLPSPGSCGLLTLALCSLALSLLAHFRTAELQARVLRLEAERGEQQMETAILGRVNQLLDEKWKLHSRRRREAPKTSPGCNCPPGPPGQPGTRGFPGFPGPIGLDGKPGHPGPKGDMGLTGPPGQPGPQGQKGEKGQCGEYPHRLLPLLNSVRLAPPPVIKRRTFQGEQSQASIQGPPGPPGPPGPSGPLGHPGLPGPMGPPGLPGPPGPKGDPGIQGYHGRKGERGMPGMPGKHGAKGAPGIAVAGMKGEPGIPGTKGEKGAEGSPGLPGLLGQKGEKGDAGNSIGGGRGEPGPPGLPGPPGPKGEAGVDGQVGPPGQPGDKGERGAAGEQGPDGPKGSKGEPGKGEMVDYNGNINEALQEIRTLALMGPPGLPGQIGPPGAPGIPGQKGEIGLPGPPGHDGEKGPRGKPGDMGPPGPQGPPGKDGPPGVKGENGHPGSPGEKGEKGETGQAGSPVPGLPGPEGPPGPPGLQGVPGPKGEAGLDGAKGEKGFQGEKGDRGPLGLPGASGLDGRPGPPGTPGPIGVPGPAGPKGERGSKGDPGMTGPTGAAGLPGLHGPPGDKGNRGERGKKGSRGPKGDKGDQGAPGLDAPCPLGEDGLPVQGCWNK

SEQ ID NO: 242 - protein, 686 aa, Homo sapiens
MVAERTHKAAATGARGPGELGAPGTVALVAARAERGARLPSPGSCGLLTLALCSLALSLLAHFRTAELQARVLRLEAERGEQQMETAILGRVNQLLDEKWKLHSRRRREAPKTSPGCNCPPGPPGPTGRPGLPGDKGAIGMPGRVGSPGDAGLSIIGPRGPPGQPGTRGFPGFPGPIGLDGKPGHPGPKGDMGLTGPPGQPGPQGQKGEKGQCGEYPHRLLPLLNSVRLAPPPVIKRRTFQGEQSQASIQGPPGPPGPPGPSGPLGHPGLPGPMGPPGLPGPPGPKGDPGIQGYHGRKGERGMPGMPGKHGAKGAPGIAVAGMKGEPGIPGTKGEKGAEGSPGLPGLLGQKGEKGDAGNSIGGGRGEPGPPGLPGPPGPKGEAGVDGQVGPPGQPGDKGERGAAGEQGPDGPKGSKGEPGKGEMVDYNGNINEALQEIRTLALMGPPGLPGQIGPPGAPGIPGQKGEIGLPGPPGHDGEKGPRGKPGDMGPPGPQGPPGKDGPPGVKGENGHPGSPGEKGEKGETGQAGSPGEKGEAGEKGNPGAEVPGLPGPEGPPGPPGLQGVPGPKGEAGLDGAKGEKGFQGEKGDRGPLGLPGTPGPIGVPGPAGPKGERGSKGDPGMTGPTGAAGLPGLHGPPGDKGNRGERGKKGSRGPKGDKGDQGAPGLDAPCPLGEDGLPVQGCWNK

SEQ ID NO: 243 - protein, 668 aa, Homo sapiens
MVAERTHKAAATGARGPGELGAPGTVALVAARAERGARLPSPGSCGLLTLALCSLALSLLAHFRTAELQARVLRLEAERGEQQMETAILGRVNQLLDEKWKLHSRRRREAPKTSPGCNCPPGPPGPTGRPGLPGDKGAIGMPGRVGSPGDAGLSIIGPRGPPGQPGTRGFPGFPGPIGLDGKPGHPGPKGDMGLTGPPGQPGPQGQKGEKGQCGEYPHRECLSSMPAALRSSQIIALKGEQSQASIQGPPGPPGPPGPSGPLGHPGLPGPMGPPGLPGPPGPKGDPGIQGYHGRKGERGMPGMPGKHGAKGAPGIAVAGMKGEPGIPGTKGEKGAEGSPGLPGLLGQKGEKGDAGNSIGGGRGEPGPPGLPGPPGPKGEAGVDGQVGPPGQPGDKGERGAAGEQGPDGPKGSKGEPGKGEMVDYNGNINEALQEIRTLALMGPPGLPGQIGPPGAPGIPGQKGEIGLPGPPGHDGEKGPRGKPGDMGPPGPQGPPGKDGPPGVKGENGHPGSPGEKGEKGETGQAGSPVPGLPGPEGPPGPPGLQGVPGPKGEAGLDGAKGEKGFQGEKGDRGPLGLPGTPGPIGVPGPAGPKGERGSKGDPGMTGPTGAAGLPGLHGPPGDKGNRGERGKKGSRGPKGDKGDQGAPGLDAPCPLGEDGLPVQGCWNK

SEQ ID NO: 244 - protein, 610 aa, Homo sapiens
MVAERTHKAAATGARGPGELGAPGTVALVAARAERGARLPSPGSCGLLTLALCSLALSLLAHFRTAELQARVLRLEAERGEQQMETAILGRVNQLLDEKWKLHSRRRREAPKTSPGCNCPPGPPGPTGRPGLPGQPGTRGFPGFPGPIGLDGKPGHPGPKGDMGLTGPPGQPGPQGQKGEKGQCGEYPHRECLSSMPAALRSSQIIALKGEQSQASIQGPPGPPGPPGPSGPLGHPGLPGPMGPPGLPGPPGPKGDPGIQGYHGRKGERGMPGMPGKHGAKGAPGIAVAGMKGEPGIPGTKGEKGAEGSPGLPGLLGQKGEKGDAGNSIGGGRGEPGPPGLPGPPGPKGEAGVDGQVGPPGQPGDKGERGAAGEQGPDGPKGSKGEPGKGEMVDYNGNINEALQEIRTLALMGPPGLPGQIGPPGAPGIPGQKGEIGLPGPPGHDGEKGPRGKPGDMGPPGPQGPPGKDGPPGVKGENGHPGSPGEKGEKGETGQAGSPVPGLPGPEGPPGPPGLQGVPGPKGEAGLDGAKGEKGFQGEKGDRGPLGLPGTPGPIGVPGPAGPKGERGSKGDPGMTGPTGAAGLPGLHGPPGDKGNRGEDGLPVQGCWNK

SEQ ID NO: 245 - protein, 695 aa, Homo sapiens
MVAERTHKAAATGARGPGELGAPGTVALVAARAERGARLPSPGSCGLLTLALCSLALSLLAHFRTAELQARVLRLEAERGEQQMETAILGRVNQLLDEKWKLHSRRRREAPKTSPGCNCPPGPPGPTGRPGLPGDKGAIGMPGRVGSPGDAGLSIIGPRGPPGQPGTRGFPGFPGPIGLDGKPGHPGPKGDMGLTGPPGQPGPQGQKGEKGQCGEYPHRECLSSMPAALRSSQIIALKGEQSQASIQGPPGPPGPPGPSGPLGHPGLPGPMGPPGLPGPPGPKGDPGIQGYHGRKGERGMPGMPGKHGAKGAPGIAVAGMKGEPGIPGTKGEKGAEGSPGLPGLLGQKGEKGDAGNSIGGGRGEPGPPGLPGPPGPKGEAGVDGQVGPPGQPGDKGERGAAGEQGPDGPKGSKGEPGKGEMVDYNGNINEALQEIRTLALMGPPGLPGQIGPPGAPGIPGQKGEIGLPGPPGHDGEKGPRGKPGDMGPPGPQGPPGKDGPPGVKGENGHPGSPGEKGEKGETGQAGSPGEKGEAGEKGNPGAEVPGLPGPEGPPGPPGLQGVPGPKGEAGLDGAKGEKGFQGEKGDRGPLGLPGASGLDGRPGPPGTPGPIGVPGPAGPKGERGSKGDPGMTGPTGAAGLPGLHGPPGDKGNRGERGKKGSRGPKGDKGDQGAPGLDAPCPLGEDGLPVQGCWNK

SEQ ID NO: 246 - protein, 717 aa, Homo sapiens
MVAERTHKAAATGARGPGELGAPGTVALVAARAERGARLPSPGSCGLLTLALCSLALSLLAHFRTAELQARVLRLEAERGEQQMETAILGRVNQLLDEKWKLHSRRRREAPKTSPGCNCPPGPPGPTGRPGLPGDKGAIGMPGRVGSPGDAGLSIIGPRGPPGQPGTRGFPGFPGPIGLDGKPGHPGPKGDMGLTGPPGQPGPQGQKGEKGQCGEYPHRECLSSMPAALRSSQIIALKLLPLLNSVRLAPPPVIKRRTFQGEQSQASIQGPPGPPGPPGPSGPLGHPGLPGPMGPPGLPGPPGPKGDPGIQGYHGRKGERGMPGMPGKHGAKGAPGIAVAGMKGEPGIPGTKGEKGAEGSPGLPGLLGQKGEKGDAGNSIGGGRGEPGPPGLPGPPGPKGEAGVDGQVGPPGQPGDKGERGAAGEQGPDGPKGSKGEPGKGEMVDYNGNINEALQEIRTLALMGPPGLPGQIGPPGAPGIPGQKGEIGLPGPPGHDGEKGPRGKPGDMGPPGPQGPPGKDGPPGVKGENGHPGSPGEKGEKGETGQAGSPGEKGEAGEKGNPGAEVPGLPGPEGPPGPPGLQGVPGPKGEAGLDGAKGEKGFQGEKGDRGPLGLPGASGLDGRPGPPGTPGPIGVPGPAGPKGERGSKGDPGMTGPTGAAGLPGLHGPPGDKGNRGERGKKGSRGPKGDKGDQGAPGLDAPCPLGEDGLPVQGCWNK

SEQ ID NO: 247 - protein, 1796 aa, Homo sapiens
MKIFQRKMRYWLLPPFLAIVYFCTIVQGQVAPPTRLRYNVISHDSIQISWKAPRGKFGGYKLLVTPTSGGKTNQLNLQNTATKAIIQGLMPDQNYTVQIIAYNKDKESKPAQGQFRIKDLEKRKDPKPRVKVVDRGNGSRPSSPEEVKFVCQTPAIADIVILVDGSWSIGRFNFRLVRHFLENLVTAFDVGSEKTRIGLAQYSGDPRIEWHLNAFSTKDEVIEAVRNLPYKGGNTLTGLALNYIFENSFKPEAGSRTGVSKIGILITDGKSQDDIIPPSRNLRESGVELFAIGVKNADVNELQEIASEPDSTHVYNVAEFDLMHTVVESLTRTLCSRVEEQDREIKASAHAITGPPTELITSEVTARSFMVNWTHAPGNVEKYRVVYYPTRGGKPDEVVVDGTVSSTVLKNLMSLTEYQIAVFAIYAHTASEGLRGTETTLALPMASDLLLYDVTENSMRVKWDAVPGASGYLILYAPLTEGLAGDEKEMKIGETHTDIELSGLLPNTEYTVTVYAMFGEEASDPVTGQETTLALSPPRNLRISNVGSNSARLTWDPTSRQINGYRIVYNNADGTEINEVEVDPITTFPLKGLTPLTEYTIAIFSIYDEGQSEPLTGVFTTEEVPAQQYLEIDEVTTDSFRVTWHPLSADEGLHKLMWIPVYGGKTEEVVLKEEQDSHVIEGLEPGTEYEVSLLAVLDDGSESEVVTAVGTTLDSFWTEPATTIVPTTSVTSVFQTGIRNLVVGDETTSSLRVKWDISDSDVQQFRVTYMTAQGDPEEEVIGTVMVPGSQNNLLLKPLLPDTEYKVTVTPIYTDGEGVSVSAPGKTLPSSGPQNLRVSEEWYNRLRITWDPPSSPVKGYRIVYKPVSVPGPTLETFVGADINTILITNLLSGMDYNVKIFASQASGFSDALTGMVKTLFLGVTNLQAKHVEMTSLCAHWQVHRHATAYRVVIESLQDRQKQESTVGGGTTRHCFYGLQPDSEYKISVYTKLQEIEGPSVSIMEKTQSLPTRPPTFPPTIPPAKEVCKAAKADLVFMVDGSWSIGDENFNKIISFLYSTVGALNKIGTDGTQVAMVQFTDDPRTEFKLNAYKTKETLLDAIKHISYKGGNTKTGKAIKYVRDTLFTAESGTRRGIPKVIVVITDGRSQDDVNKISREMQLDGYSIFAIGVADADYSELVSIGSKPSARHVFFVDDFDAFKKIEDELITFVCETASATCPVVHKDGIDLAGFKMMEMFGLVEKDFSSVEGVSMEPGTFNVFPCYQLHKDALVSQPTRYLHPEGLPSDYTISFLFRILPDTPQEPFALWEILNKNSDPLVGVILDNGGKTLTYFNYDQSGDFQTVTFEGPEIRKIFYGSFHKLHIVVSETLVKVVIDCKQVGEKAMNASANITSDGVEVLGKMVRSRGPGGNSAPFQLQMFDIVCSTSWANTDKCCELPGLRDDESCPDLPHSCSCSETNEVALGPAGPPGGPGLRGPKGQQGEPGPKGPDGPRGEIGLPGPQGPPGPQGPSGLSIQGMPGMPGEKGEKGDTGLPGPQGIPGGVGSPGRDGSPGQRGLPGKDGSSGPPGPPGPIGIPGTPGVPGITGSMGPQGALGPPGVPGAKGERGERGDLQSQAMVRSVARQVCEQLIQSHMARYTAILNQIPSHSSSIRTVQGPPGEPGRPGSPGAPGEQGPPGTPGFPGNAGVPGTPGERGLTGIKGEKGNPGVGTQGPRGPPGPAGPSGESRPGSPGPPGSPGPRGPPGHLGVPGPQGPSGQPGYCDPSSCSAYGVRAPHPDQPEFTPVQDELEAMELWGPGV

SEQ ID NO: 248 - protein, 1604 aa, Homo sapiens
MWVSWAPGLWLLGLWATFGHGANTGAQCPPSQQEGLKLEHSSSLPANVTGFNLIHRLSLMKTSAIKKIRNPKGPLILRLGAAPVTQPTRRVFPRGLPEEFALVLTLLLKKHTHQKTWYLFQVTDANGYPQISLEVNSQERSLELRAQGQDGDFVSCIFPVPQLFDLRWHKLMLSVAGRVASVHVDCSSASSQPLGPRRPMRPVGHVFLGLDAEQGKPVSFDLQQVHIYCDPELVLEEGCCEILPAGCPPETSKARRDTQSNELIEINPQSEGKVYTRCFCLEEPQNSEVDAQLTGRISQKAERGAKVHQETAADECPPCVHGARDSNVTLAPSGPKGGKGERGLPGPPGSKGEKGARGNDCVRISPDAPLQCAEGPKGEKGESGALGPSGLPGSTGEKGQKGEKGDGGIKGVPGKPGRDGRPGEICVIGPKGQKGDPGFVGPEGLAGEPGPPGLPGPPGIGLPGTPGDPGGPPGPKGDKGSSGIPGKEGPGGKPGKPGVKGEKGDPCEVCPTLPEGFQNFVGLPGKPGPKGEPGDPVPARGDPGIQGIKGEKGEPCLSCSSVVGAQHLVSSTGASGDVGSPGFGLPGLPGRAGVPGLKGEKGNFGEAGPAGSPGPPGPVGPAGIKGAKGEPCEPCPALSNLQDGDVRVVALPGPSGEKGEPGPPGFGLPGKQGKAGERGLKGQKGDAGNPGDPGTPGTTGRPGLSGEPGVQGPAGPKGEKGDGCTACPSLQGTVTDMAGRPGQPGPKGEQGPEGVGRPGKPGQPGLPGVQGPPGLKGVQGEPGPPGRGVQGPQGEPGAPGLPGIQGLPGPRGPPGPTGEKGAQGSPGVKGATGPVGPPGASVSGPPGRDGQQGQTGLRGTPGEKGPRGEKGEPGECSCPSQGDLIFSGMPGAPGLWMGSSWQPGPQGPPGIPGPPGPPGVPGLQGVPGNNGLPGQPGLTAELGSLPIEQHLLKSICGDCVQGQRAHPGYLVEKGEKGDQGIPGVPGLDNCAQCFLSLERPRAEEARGDNSEGDPGCVGSPGLPGPPGLPGQRGEEGPPGMRGSPGPPGPIGPPGFPGAVGSPGLPGLQGERGLTGLTGDKGEPGPPGQPGYPGATGPPGLPGIKGERGYTGSAGEKGEPGPPGSEGLPGPPGPAGPRGERGPQGNSGEKGDQGFQGQPGFPGPPGPPGFPGKVGSPGPPGPQAEKGSEGIRGPSGLPGSPGPPGPPGIQGPAGLDGLDGKDGKPGLRGDPGPAGPPGLMGPPGFKGKTGHPGLPGPKGDCGKPGPPGSTGRPGAEGEPGAMGPQGRPGPPGHVGPPGPPGQPGPAGISAVGLKGDRGATGERGLAGLPGQPGPPGHPGPPGEPGTDGAAGKEGPPGKQGFYGPPGPKGDPGAAGQKGQAGEKGRAGMPGGPGKSGSMGPVGPPGPAGERGHPGAPGPSGSPGLPGVPGSMGDMVNYDEIKRFIRQEIIKMFDERMAYYTSRMQFPMEMAAAPGRPGPPGKDGAPGRPGAPGSPGLPGQIGREGRQGLPGVRGLPGTKGEKGDIGIGIAGENGLPGPPGPQGPPGYGKMGATGPMGQQGIPGIPGPPGPMGQPGKAGHCNPSDCFGAMPMEQQYPPMKTMKGPFG

SEQ ID NO: 249 - protein, 1497 aa, Homo sapiens
MDVTKKNKRDGTEVTERIVTETVTTRLTSLPPKGGTSNGYAKTASLGGGSRLEKQSLTHGSSGYINSTGSTRGHASTSSYRRAHSPASTLPNSPGSTFERKTHVTRHAYEGSSSGNSSPEYPRKEFASSSTRGRSQTRESEIRVRLQSASPSTRWTELDDVKRLLKGSRSASVSPTRNSSNTLPIPKKGTVETKIVTASSQSVSGTYDATILDANLPSHVWSSTLPAGSSMGTYHNNMTTQSSSLLNTNAYSAGSVFGVPNNMASCSPTLHPGLSTSSSVFGMQNNLAPSLTTLSHGTTTTSTAYGVKKNMPQSPAAVNTGVSTSAACTTSVQSDDLLHKDCKFLILEKDNTPAKKEMELLIMTKDSGKVFTASPASIAATSFSEDTLKKEKQAAYNADSGLKAEANGDLKTVSTKGKTTTADIHSYGSSGGGGSGGGGGVGGAGGGPWGPAPAWCPCGSCCSWWKWLLGLLLTWLLLLGLLFGLIALAEEVRKLKARVDELERIRRSILPYGDSMDRIEKDRLQGMAPAAGADLDKIGLHSDSQEELWMFVRKKLMMEQENGNLRGSPGPKGDMGSPGPKGDRGFPGTPGIPGPLGHPGPQGPKGQKGSVGDPGMEGPMGQRGREGPMGPRGEAGPPGSGEKGERGAAGEPGPHGPPGVPGSVGPKGSSGSPGPQGPPGPVGLQGLRGEVGLPGVKGDKGPMGPPGPKGDQGEKGPRGLTGEPGMRGLPGAVGEPGAKGAMGPAGPDGHQGPRGEQGLTGMPGIRGPPGPSGDPGKPGLTGPQGPQGLPGTPGRPGIKGEPGAPGKIVTSEGSSMLTVPGPPGPPGAMGPPGPPGAPGPAGPAGLPGHQEVLNLQGPPGPPGPRGPPGPSIPGPPGPRGPPGEGLPGPPGPPGSFLSNSETFLSGPPGPPGPPGPKGDQGPPGPRGHQGEQGLPGFSTSGSSSFGLNLQGPPGPPGPQGPKGDKGDPGVPGALGIPSGPSEGGSSSTMYVSGPPGPPGPPGPPGSISSSGQEIQQYISEYMQSDSIRSYLSGVQGPPGPPGPPGPVTTITGETFDYSELASHVVSYLRTSGYGVSLFSSSISSEDILAVLQRDDVRQYLRQYLMGPRGPPGPPGASGDGSLLSLDYAELSSRILSYMSSSGISIGLPGPPGPPGLPGTSYEELLSLLRGSEFRGIVGPPGPPGPPGIPGNVWSSISVEDLSSYLHTAGLSFIPGPPGPPGPPGPRGPPGVSGALATYAAENSDSFRSELISYLTSPDVRSFIVGPPGPPGPQGPPGDSRLLSTDASHSRGSSSSSHSSSVRRGSSYSSSMSTGGGGAGSLGAGGAFGEAAGDRGPYGTDIGPGGGYGAAAEGGMYAGNGGLLGADFAGDLDYNELAVRVSESMQRQGLLQGMAYTVQGPPGQPGPQGPPGISKVFSAYSNVTADLMDFFQTYGAIQGPPGQKGEMGTPGPKGDRGPAGPPGHPGPPGPRGHKGEKGDKGDQVYAGRRRRRSIAVKP

SEQ ID NO: 250 - protein, 1516 aa, Homo sapiens
MAPYPCGCHILLLLFCCLAAARANLLNLNWLWFNNEDTSHAATTIPEPQGPLPVQPTADTTTHVTPRNGSTEPATAPGSPEPPSELLEDGQDTPTSAESPDAPEENIAGVGAEILNVAKGIRSFVQLWNDTVPTESLARAETLVLETPVGPLALAGPSSTPQENGTTLWPSRGIPSSPGAHTTEAGTLPAPTPSPPSLGRPWAPLTGPSVPPPSSERISEEVGLLQLLGDPPPQQVTQTDDPDVGLAYVFGPDANSGQVARYHFPSLFFRDFSLLFHIRPATEGPGVLFAITDSAQAMVLLGVKLSGVQDGHQDISLLYTEPGAGQTHTAASFRLPAFVGQWTHLALSVAGGFVALYVDCEEFQRMPLARSSRGLELEPGAGLFVAQAGGADPDKFQGVIAELKVRRDPQVSPMHCLDEEGDDSDGASGDSGSGLGDARELLREETGAALKPRLPAPPPVTTPPLAGGSSTEDSRSEEVEEQTTVASLGAQTLPGSDSVSTWDGSVRTPGGRVKEGGLKGQKGEPGVPGPPGRAGPPGSPCLPGPPGLPCPVSPLGPAGPALQTVPGPQGPPGPPGRDGTPGRDGEPGDPGEDGKPGDTGPQGFPGTPGDVGPKGDKGDPGVGERGPPGPQGPPGPPGPSFRHDKLTFIDMEGSGFGGDLEALRGPRGFPGPPGPPGVPGLPGEPGRFGVNSSDVPGPAGLPGVPGREGPPGFPGLPGPPGPPGREGPPGRTGQKGSLGEAGAPGHKGSKGAPGPAGARGESGLAGAPGPAGPPGPPGPPGPPGPGLPAGFDDMEGSGGPFWSTARSADGPQGPPGLPGLKGDPGVPGLPGAKGEVGADGVPGFPGLPGREGIAGPQGPKGDRGSRGEKGDPGKDGVGQPGLPGPPGPPGPVVYVSEQDGSVLSVPGPEGRPGFAGFPGPAGPKGNLGSKGERGSPGPKGEKGEPGSIFSPDGGALGPAQKGAKGEPGFRGPPGPYGRPGYKGEIGFPGRPGRPGMNGLKGEKGEPGDASLGFGMRGMPGPPGPPGPPGPPGTPVYDSNVFAESSRPGPPGLPGNQGPPGPKGAKGEVGPPGPPGQFPFDFLQLEAEMKGEKGDRGDAGQKGERGEPGGGGFFGSSLPGPPGPPGPRGYPGIPGPKGESIRGQPGPPGPQGPPGIGYEGRQGPPGPPGPPGPPSFPGPHRQTISVPGPPGPPGPPGPPGTMGASSGVRLWATRQAMLGQVHEVPEGWLIFVAEQEELYVRVQNGFRKVQLEARTPLPRGTDNEVAALQPPVVQLHDSNPYPRREHPHPTARPWRADDILASPPRLPEPQPYPGAPHHSSYVHLRPARPTSPPAHSHRDFQPVLHLVALNSPLSGGMRGIRGADFQCFQQARAVGLAGTFRAFLSSRLQDLYSIVRRADRAAVPIVNLKDELLFPSWEALFSGSEGPLKPGARIFSFDGKDVLRHPTWPQKSVWHGSDPNGRRLTESYCETWRTEAPSATGQASSLLGGRLLGQSAASCHHAYIVLCIENSFMTASK

SEQ ID NO: 251 - protein, 1336 aa, Homo sapiens
MAPRCPWPWPRRRRLLDVLAPLVLLLGVRAASAEPERISEEVGLLQLLGDPPPQQVTQTDDPDVGLAYVFGPDANSGQVARYHFPSLFFRDFSLLFHIRPATEGPGVLFAITDSAQAMVLLGVKLSGVQDGHQDISLLYTEPGAGQTHTAASFRLPAFVGQWTHLALSVAGGFVALYVDCEEFQRMPLARSSRGLELEPGAGLFVAQAGGADPDKFQGVIAELKVRRDPQVSPMHCLDEEGDDSDGASGDSGSGLGDARELLREETGAALKPRLPAPPPVTTPPLAGGSSTEDSRSEEVEEQTTVASLGAQTLPGSDSVSTWDGSVRTPGGRVKEGGLKGQKGEPGVPGPPGRAGPPGSPCLPGPPGLPCPVSPLGPAGPALQTVPGPQGPPGPPGRDGTPGRDGEPGDPGEDGKPGDTGPQGFPGTPGDVGPKGDKGDPGVGERGPPGPQGPPGPPGPSFRHDKLTFIDMEGSGFGGDLEALRGPRGFPGPPGPPGVPGLPGEPGRFGVNSSDVPGPAGLPGVPGREGPPGFPGLPGPPGPPGREGPPGRTGQKGSLGEAGAPGHKGSKGAPGPAGARGESGLAGAPGPAGPPGPPGPPGPPGPGLPAGFDDMEGSGGPFWSTARSADGPQGPPGLPGLKGDPGVPGLPGAKGEVGADGVPGFPGLPGREGIAGPQGPKGDRGSRGEKGDPGKDGVGQPGLPGPPGPPGPVVYVSEQDGSVLSVPGPEGRPGFAGFPGPAGPKGNLGSKGERGSPGPKGEKGEPGSIFSPDGGALGPAQKGAKGEPGFRGPPGPYGRPGYKGEIGFPGRPGRPGMNGLKGEKGEPGDASLGFGMRGMPGPPGPPGPPGPPGTPVYDSNVFAESSRPGPPGLPGNQGPPGPKGAKGEVGPPGPPGQFPFDFLQLEAEMKGEKGDRGDAGQKGERGEPGGGGFFGSSLPGPPGPPGPRGYPGIPGPKGESIRGQPGPPGPQGPPGIGYEGRQGPPGPPGPPGPPSFPGPHRQTISVPGPPGPPGPPGPPGTMGASSGVRLWATRQAMLGQVHEVPEGWLIFVAEQEELYVRVQNGFRKVQLEARTPLPRGTDNEVAALQPPVVQLHDSNPYPRREHPHPTARPWRADDILASPPRLPEPQPYPGAPHHSSYVHLRPARPTSPPAHSHRDFQPVLHLVALNSPLSGGMRGIRGADFQCFQQARAVGLAGTFRAFLSSRLQDLYSIVRRADRAAVPIVNLKDELLFPSWEALFSGSEGPLKPGARIFSFDGKDVLRHPTWPQKSVWHGSDPNGRRLTESYCETWRTEAPSATGQASSLLGGRLLGQSAASCHHAYIVLCIENSFMTASK

SEQ ID NO: 252 - protein, 1751 aa, Homo sapiens
MAPYPCGCHILLLLFCCLAAARANLLNLNWLWFNNEDTSHAATTIPEPQGPLPVQPTADTTTHVTPRNGSTEPATAPGSPEPPSELLEDGQDTPTSAESPDAPEENIAGVGAEILNVAKGIRSFVQLWNDTVPTESLARAETLVLETPVGPLALAGPSSTPQENGTTLWPSRGIPSSPGAHTTEAGTLPAPTPSPPSLGRPWAPLTGPSVPPPSSGRASLSSLLGGAPPWGSLQDPDSQGLSPAAAAPSQQLQRPDVRLRTPLLHPLVMGSLGKHAAPSAFSSGLPGALSQVAVTTLTRDSGAWVSHVANSVGPGLANNSALLGADPEAPAGRCLPLPPSLPVCGHLGISRFWLPNHLHHESGEQVRAGARAWGGLLQTHCHPFLAWFFCLLLVPPCGSVPPPAPPPCCQFCEALQDACWSRLGGGRLPVACASLPTQEDGYCVLIGPAAERISEEVGLLQLLGDPPPQQVTQTDDPDVGLAYVFGPDANSGQVARYHFPSLFFRDFSLLFHIRPATEGPGVLFAITDSAQAMVLLGVKLSGVQDGHQDISLLYTEPGAGQTHTAASFRLPAFVGQWTHLALSVAGGFVALYVDCEEFQRMPLARSSRGLELEPGAGLFVAQAGGADPDKFQGVIAELKVRRDPQVSPMHCLDEEGDDSDGASGDSGSGLGDARELLREETGAALKPRLPAPPPVTTPPLAGGSSTEDSRSEEVEEQTTVASLGAQTLPGSDSVSTWDGSVRTPGGRVKEGGLKGQKGEPGVPGPPGRAGPPGSPCLPGPPGLPCPVSPLGPAGPALQTVPGPQGPPGPPGRDGTPGRDGEPGDPGEDGKPGDTGPQGFPGTPGDVGPKGDKGDPGVGERGPPGPQGPPGPPGPSFRHDKLTFIDMEGSGFGGDLEALRGPRGFPGPPGPPGVPGLPGEPGRFGVNSSDVPGPAGLPGVPGREGPPGFPGLPGPPGPPGREGPPGRTGQKGSLGEAGAPGHKGSKGAPGPAGARGESGLAGAPGPAGPPGPPGPPGPPGPGLPAGFDDMEGSGGPFWSTARSADGPQGPPGLPGLKGDPGVPGLPGAKGEVGADGVPGFPGLPGREGIAGPQGPKGDRGSRGEKGDPGKDGVGQPGLPGPPGPPGPVVYVSEQDGSVLSVPGPEGRPGFAGFPGPAGPKGNLGSKGERGSPGPKGEKGEPGSIFSPDGGALGPAQKGAKGEPGFRGPPGPYGRPGYKGEIGFPGRPGRPGMNGLKGEKGEPGDASLGFGMRGMPGPPGPPGPPGPPGTPVYDSNVFAESSRPGPPGLPGNQGPPGPKGAKGEVGPPGPPGQFPFDFLQLEAEMKGEKGDRGDAGQKGERGEPGGGGFFGSSLPGPPGPPGPRGYPGIPGPKGESIRGQPGPPGPQGPPGIGYEGRQGPPGPPGPPGPPSFPGPHRQTISVPGPPGPPGPPGPPGTMGASSGVRLWATRQAMLGQVHEVPEGWLIFVAEQEELYVRVQNGFRKVQLEARTPLPRGTDNEVAALQPPVVQLHDSNPYPRREHPHPTARPWRADDILASPPRLPEPQPYPGAPHHSSYVHLRPARPTSPPAHSHRDFQPVLHLVALNSPLSGGMRGIRGADFQCFQQARAVGLAGTFRAFLSSRLQDLYSIVRRADRAAVPIVNLKDELLFPSWEALFSGSEGPLKPGARIFSFDGKDVLRHPTWPQKSVWHGSDPNGRRLTESYCETWRTEAPSATGQASSLLGGRLLGQSAASCHHAYIVLCIENSFMTASK

SEQ ID NO: 253 - protein, 1142 aa, Homo sapiens
MRLTGPWKLWLWMSIFLLPASTSVTVRDKTEESCPILRIEGHQLTYDNINKLEVSGFDLGDSFSLRRAFCESDKTCFKLGSALLIRDTIKIFPKGLPEEYSVAAMFRVRRNAKKERWFLWQVLNQQNIPQISIVVDGGKKVVEFMFQATEGDVLNYIFRNRELRPLFDRQWHKLGISIQSQVISLYMDCNLIARRQTDEKDTVDFHGRTVIATRASDGKPVDIELHQLKIYCSANLIAQETCCEISDTKCPEQDGFGNIASSWVTAHASKMSSYLPAKQELKDQCQCIPNKGEAGLPGAPGSPGQKGHKGEPGENGLHGAPGFPGQKGEQGFEGSKGETGEKGEQGEKGDPALAGLNGENGLKGDLGPHGPPGPKGEKGDTGPPGPPALPGSLGIQGPQGPPGKEGQRGRRGKTGPPGKPGPPGPPGPPGIQGIHQTLGGYYNKDNKGNDEHEAGGLKGDKGETGLPGFPGSVGPKGQKGEPGEPFTKGEKGDRGEPGVIGSQGVKGEPGDPGPPGLIGSPGLKGQQGSAGSMGPRGPPGDVGLPGEHGIPGKQGIKGEKGDPGGIIGPPGLPGPKGEAGPPGKSLPGEPGLDGNPGAPGPRGPKGERGLPGVHGSPGDIGPQGIGIPGRTGAQGPAGEPGIQGPRGLPGLPGTPGTPGNDGVPGRDGKPGLPGPPGDPIALPLLGDIGALLKNFCGNCQASVPGLKSNKGEEGGAGEPGKYDSMARKGDIGPRGPPGIPGREGPKGSKGERGYPGIPGEKGDEGLQGIPGIPGAPGPTGPPGLMGRTGHPGPTGAKGEKGSDGPPGKPGPPGPPGIPFNERNGMSSLYKIKGGVNVPSYPGPPGPPGPKGDPGPVGEPGAMGLPGLEGFPGVKGDRGPAGPPGIAGMSGKPGAPGPPGVPGEPGERGPVGDIGFPGPEGPSGKPGINGKDGIPGAQGIMGKPGDRGPKGERGDQGIPGDRGSQGERGKPGLTGMKGAIGPMGPPGNKGSMGSPGHQGPPGSPGIPGIPADAVSFEEIKKYINQEVLRIFEERMAVFLSQLKLPAAMLAAQAYGRPGPPGKDGLPGPPGDPGPQGYRGQKGERGEPGIGLPGSPGLPGTSALGLPGSPGAPGPQGPPGPSGRCNPEDCLYPVSHAHQRTGGN

SEQ ID NO: 254 - protein, 1125 aa, Homo sapiens
MWNRYFVFYLLLLSAFTSQTVSGQRKKGPKSNLLARKSDVQGSICFIDIVFIVDSSESSKIALFDKQKDFVDSLSDKIFQLTPGRSLEYDIKLAALQFSSSVQIDPPFSSWKDLQTFKQKVKSMNLIGQGTFSYYAISNATRLLKREGRKDGVKVVLLMTDGIDHPKNPDVQSISEDARISGISFITIALSTVVNEAKLRLISGDSSSEPTLLLSDPTLVDKIQDRLDILFEKKCERKICECEKGDPGDPGPPGTHGNPGIKGERGPKGNPGNAQKGEAGERGPGGIPGYKGDKGERGECGKPGIKGDKGSPGPYGPKGPRGIQGITGPPGDPGPKGFQGNKGEPGPPGPYGSPGAPGIGQQGIKGERGQEGRPGAPGPIGVGEPGQPGPRGPEGVPGERGLPGEGFPGPKGEKGSEGPTGPQGLQGLSIKGEKGDIGPVGPQGPMGIPGIGSQGEQGIQGPIGPPGPQGPAGQGLPGSKGEVGQMGPTGPRGPVGIGVQGPKGEPGSIGLPGQPGVPGEDGAAGKKGEAGLPGARGPEGPPGKGQPGPKGDEGKKGSKGNQGQRGLPGPEGPKGEPGIMGPFGMPGTSIPGPPGPKGDRGGPGIPGFKGEPGLSIRGPKGVQGPRGPVGAPGLKGDGYPGVPGPRGLPGPPGPMGLRGVGDTGAKGEPGVRGPPGPSGPRGVGTQGPKGDTGQKGLPGPPGPPGYGSQGIKGEQGPQGFPGPKGTMGHGLPGQKGEHGERGDVGKKGDKGEIGEPGSPGKQGLQGPKGDLGLTKEEIIKLITEICGCGPKCKETPLELVFVIDSSESVGPENFQIIKNFVKTMADRVALDLATARIGIINYSHKVEKVANLKQFSSKDDFKLAVDNMQYLGEGTYTATALQAANDMFEDARPGVKKVALVITDGQTDSRDKEKLTEVVKNASDTNVEIFVIGVVKKNDPNFEIFHKEMNLIATDPEHVYQFDDFFTLQDTLKQKLFQKICEDFDSYLVQIFGSSSPQPGFGMSGEELSESTPEPQKEISESLSVTRDQDEDDKAPEPTWADDLPATTSSEATTTPRPLLSTPVDGAEDPRCLEALKPGNCGEYVVRWYYDKQVNSCARFWFSGCNGSGNRFNSEKECQETCIQG

SEQ ID NO: 255 - protein, 519 aa, Homo sapiens
MGPRLSVWLLLLPAALLLHEEHSRAAAKGGCAGSGCGKCDCHGVKGQKGERGLPGLQGVIGFPGMQGPEGPQGPPGQKGDTGEPGLPGTKGTRGPPGASGYPGNPGLPGIPGQDGPPGPPGIPGCNGTKGERGPLGPPGLPGFAGNPGPPGLPGMKGDPGEILGHVPGMLLKGERGFPGIPGTPGPPGLPGLQGPVGPPGFTGPPGPPGPPGPPGEKGQMGLSFQGPKGDKGDQGVSGPPGVPGQAQVQEKGDFATKGEKGQKGEPGFQGMPGVGEKGEPGKPGPRGKPGKDGDKGEKGSPGFPGEPGYPGLIGRQGPQGEKGEAGPPGPPGIVIGTGPLGEKGERGYPGTPGPRGEPGPKGFPGLPGQPGPPGLPVPGQAGAPGFPGERGEKGDRGFPGTSLPGPSGRDGLPGPPGSPGPPGQPGYTNGIVECQPGPPGDQGPPGIPGQPGFIGEIGEKGQKGESCLICDIDGYRGPPGPQGPPGEIGFPGQPGAKGDRGLPGRDGVAGVPLLFQIHK

SEQ ID NO: 256 - protein, 4 aa, Artificial Sequence
  source: /note="Description of Artificial Sequence: Synthetic peptide"
NPGP

SEQ ID NO: 257 - RNA, 30 nt, Artificial Sequence
  source: /note="Description of Artificial Sequence: Synthetic oligonucleotide"
  misc_feature (1)..(30): /note="This sequence may encompass 1-10 'ccg' repeating units"
ccgccgccgccgccgccgccgccgccgccg

SEQ ID NO: 258 - RNA, 24 nt, Artificial Sequence
  source: /note="Description of Artificial Sequence: Synthetic oligonucleotide"
  misc_feature (1)..(24): /note="This sequence may encompass 2-8 'ccg' repeating units"
ccgccgccgccgccgccgccgccg

SEQ ID NO: 259 - RNA, 18 nt, Artificial Sequence
  source: /note="Description of Artificial Sequence: Synthetic oligonucleotide"
  misc_feature (1)..(18): /note="This sequence may encompass 3-6 'ccg' repeating units"
ccgccgccgccgccgccg

SEQ ID NO: 260 - RNA, 15 nt, Artificial Sequence
  source: /note="Description of Artificial Sequence: Synthetic oligonucleotide"
  misc_feature (1)..(15): /note="This sequence may encompass 4-5 'ccg' repeating units"
ccgccgccgccgccg

SEQ ID NO: 261 - RNA, 15 nt, Artificial Sequence
  source: /note="Description of Artificial Sequence: Synthetic oligonucleotide"
  misc_feature (1)..(15): /note="This sequence may encompass 1-5 'ccg' repeating units"
ccgccgccgccgccg

SEQ ID NO: 262 - RNA, 12 nt, Artificial Sequence
  source: /note="Description of Artificial Sequence: Synthetic oligonucleotide"
ccgccgccgccg

SEQ ID NO: 263 - RNA, 15 nt, Artificial Sequence
  source: /note="Description of Artificial Sequence: Synthetic oligonucleotide"
ccgccgccgccgccg

SEQ ID NO: 264 - RNA, 30 nt, Artificial Sequence
  source: /note="Description of Artificial Sequence: Synthetic oligonucleotide"
  misc_feature (1)..(30): /note="This sequence may encompass 1-10 'gcc' repeating units"
gccgccgccgccgccgccgccgccgccgcc

SEQ ID NO: 265 - RNA, 150 nt, Artificial Sequence
  source: /note="Description of Artificial Sequence: Synthetic polynucleotide"
  misc_feature (1)..(150): /note="This sequence may encompass 50-150 nucleotides"
aaaaaaaaaaaaaaaaaaaaaaaaaaaaaaaaaaaaaaaaaaaaaaaaaaaaaaaaaaaaaaaaaaaaaaaaaaaaaaaaaaaaaaaaaaaaaaaaaaaaaaaaaaaaaaaaaaaaaaaaaaaaaaaaaaaaaaaaaaaaaaaaaaaaaa

SEQ ID NO: 266 - RNA, 150 nt, Artificial Sequence; identical to SEQ ID NO: 265
  source: /note="Description of Artificial Sequence: Synthetic polynucleotide"
  misc_feature (1)..(150): /note="This sequence may encompass 75-150 nucleotides"

SEQ ID NO: 267 - RNA, 150 nt, Artificial Sequence; identical to SEQ ID NO: 265
  source: /note="Description of Artificial Sequence: Synthetic polynucleotide"
  misc_feature (1)..(150): /note="This sequence may encompass 85-150 nucleotides"

SEQ ID NO: 268 - RNA, 150 nt, Artificial Sequence; identical to SEQ ID NO: 265
  source: /note="Description of Artificial Sequence: Synthetic polynucleotide"
  misc_feature (1)..(150): /note="This sequence may encompass 90-150 nucleotides"

SEQ ID NO: 269 - RNA, 120 nt, Artificial Sequence
  source: /note="Description of Artificial Sequence: Synthetic polynucleotide"
  misc_feature (1)..(120): /note="This sequence may encompass 90-120 nucleotides"
aaaaaaaaaaaaaaaaaaaaaaaaaaaaaaaaaaaaaaaaaaaaaaaaaaaaaaaaaaaaaaaaaaaaaaaaaaaaaaaaaaaaaaaaaaaaaaaaaaaaaaaaaaaaaaaaaaaaaaaa

SEQ ID NO: 270 - RNA, 130 nt, Artificial Sequence
  source: /note="Description of Artificial Sequence: Synthetic polynucleotide"
  misc_feature (1)..(130): /note="This sequence may encompass 90-130 nucleotides"
aaaaaaaaaaaaaaaaaaaaaaaaaaaaaaaaaaaaaaaaaaaaaaaaaaaaaaaaaaaaaaaaaaaaaaaaaaaaaaaaaaaaaaaaaaaaaaaaaaaaaaaaaaaaaaaaaaaaaaaaaaaaaaaaaa

SEQ ID NO: 271 - DNA, 120 bp, Artificial Sequence
  source: /note="Description of Artificial Sequence: Synthetic polynucleotide"
tttttttttttttttttttttttttttttttttttttttttttttttttttttttttttttttttttttttttttttttttttttttttttttttttttttttttttttttttttttttt

SEQ ID NO: 272 - RNA, 100 nt, Artificial Sequence
  source: /note="Description of Artificial Sequence: Synthetic polynucleotide"
aaaaaaaaaaaaaaaaaaaaaaaaaaaaaaaaaaaaaaaaaaaaaaaaaaaaaaaaaaaaaaaaaaaaaaaaaaaaaaaaaaaaaaaaaaaaaaaaaaaa

SEQ ID NO: 273 - RNA, 120 nt, Artificial Sequence; identical to SEQ ID NO: 269
  source: /note="Description of Artificial Sequence: Synthetic polynucleotide"

1. A method for (i) promoting and/or improving wound healing in a human subject in need thereof, (ii) preventing and/or reducing scar formation at a wound in a human subject in need thereof, or (iii) reducing the visibility of a scar in a human subject in need thereof, comprising intradermally or topically administering to a wound of the subject an effective amount of a pharmaceutical composition comprising a messenger RNA (mRNA) comprising an open reading frame (ORF) encoding a wound healing polypeptide.

2. (canceled)

3. The method of claim 1, wherein the wound is a surgical wound, a burn, an abrasive wound, a skin biopsy site, a chronic wound, an injury, a graft wound, a diabetic wound, a diabetic ulcer, a pressure ulcer, a bed sore, or combinations thereof.

4. The method of claim 3, wherein the injury is a traumatic injury wound and the diabetic ulcer is a diabetic foot ulcer.

5. (canceled)

6. The method of claim 1, wherein the wound is a nonhealing wound, an open wound, a closed wound, or an abraded wound.

7. The method of claim 6, wherein the nonhealing wound is a diabetic foot ulcer, a pressure ulcer, or a chronic venous leg ulcer.

8.-10. (canceled)

11. The method of claim 1, wherein the subject has diabetes.

12. (canceled)

13. The method of claim 1, wherein the wound healing polypeptide is selected from the group consisting of a growth factor, a cytokine, a chemokine, a protease inhibitor, and a collagen.

14. The method of claim 13, wherein the growth factor is selected from the group consisting of amphiregulin, connective tissue growth factor (CTGF), epidermal growth factor (EGF), epigen, epiregulin, fibroblast growth factor 2 (FGF2), fibroblast growth factor 7 (FGF7), fibroblast growth factor 10 (FGF10), heparin binding epidermal growth factor-like growth factor (HB-EGF), insulin-like growth factor 1 (IGF1), insulin-like growth factor 2 (IGF2), neuregulin 1 (NRG-1), placental growth factor (PLGF), a platelet derived growth factor (PDGF) (e.g., PGDF-AA, PGDF-BB, or PGDF-AB), transforming growth factor α (TGF-α), transforming growth factor β (TGF-β), and vascular endothelial growth factor C (VEGF-C);
the cytokine is selected from the group consisting of granulocyte colony-stimulating factor (G-CSF), granulocyte macrophage colony stimulating factor (GM-CSF), hepatocyte growth factor (HGF), interleukin 1 (IL-1), interleukin 6 (IL-6), interleukin 8 (IL-8), interleukin 10 (IL-10), and tumor necrosis factor α (TNF-α);
the chemokine is macrophage chemo-attractant protein (MCP-1) or stromal cell-derived factor 1 (SDF-1); and
the protease inhibitor is secretory leukocyte protease inhibitor (SLPI).

15.-17. (canceled)

18. A method for treating epidermolysis bullosa in a human subject in need thereof, comprising intradermally or topically administering to a blister or skin erosion of the subject an effective amount of a pharmaceutical composition comprising a messenger RNA (mRNA) comprising an open reading frame (ORF) encoding a collagen.

19. (canceled)

20. The method of claim 1, wherein the wound healing polypeptide comprises the amino acid sequence set forth in any one of SEQ ID NOs: 9-38, 45-84, 197-211, or 213-255.

21. (canceled)

22. The method of claim 1, comprising topically or intradermally administering to the subject the effective amount of the pharmaceutical composition.

23.-24. (canceled)

25. The method of claim 1, wherein the mRNA comprises a microRNA (miR) binding site.

26. The method of claim 25, wherein the microRNA is expressed in an immune cell of hematopoietic lineage or a cell that expresses TLR7 and/or TLR8 and secretes pro-inflammatory cytokines and/or chemokines.

27. The method of claim 25, wherein the microRNA binding site is for a microRNA selected from the group consisting of miR-126, miR-142, miR-144, miR-146, miR-150, miR-155, miR-16, miR-21, miR-223, miR-24, miR-27, miR-26a, and any combination thereof.

28. The method of claim 25, wherein the microRNA binding site is for a microRNA selected from the group consisting of miR126-3p, miR-142-3p, miR-142-5p, miR-155, and any combination thereof.

29. The method of claim 25, wherein the microRNA binding site is a miR-142-3p binding site.

30. The method of claim 25, wherein the microRNA binding site is located in the 3′ UTR of the mRNA.

31. The method of claim 1, wherein the mRNA comprises a 3′ UTR, said 3′ UTR comprising a nucleic acid sequence at least 90%, at least 95%, at least 96%, at least 97%, at least 98%, at least 99%, or 100% identical to a 3′ UTR sequence of SEQ ID NO:111.

32. The method of claim 1, wherein the mRNA comprises a 5′ UTR, said 5′ UTR comprising a nucleic acid sequence at least 90%, at least 95%, at least 96%, at least 97%, at least 98%, at least 99%, or 100% identical to a 5′ UTR sequence of SEQ ID NO:3.

33. The method of claim 1, wherein the mRNA comprises a 5′ terminal cap.

34. The method of claim 33, wherein the 5′ terminal cap comprises a Cap0, Cap1, ARCA, inosine, N1-methyl-guanosine, 2′-fluoro-guanosine, 7-deaza-guanosine, 8-oxo-guanosine, 2-amino-guanosine, LNA-guanosine, 2-azidoguanosine, Cap2, Cap4, 5′ methylG cap, or an analog thereof.

35. The method of claim 1, wherein the mRNA comprises a poly-A region.

36. The method of claim 35, wherein the poly-A region is at least 10, at least 20, at least 30, at least 40, at least 50, at least 60, at least 70, at least 80, at least 90 nucleotides in length, or at least 100 nucleotides in length.

37. (canceled)

38. The method of claim 1, wherein the mRNA comprises at least one chemically modified nucleobase, sugar, backbone, or any combination thereof.

39. The method of claim 38, wherein the at least one chemically modified nucleobase is selected from the group consisting of pseudouracil (ψ), N1 methylpseudouracil (m1ψ), 1-ethylpseudouracil, 2-thiouracil (s2U), 4′-thiouracil, 5-methylcytosine, 5-methyluracil, 5-methoxyuracil, and any combination thereof.

40. The method of claim 38, wherein at least 25%, at least 30%, at least 40%, at least 50%, at least 60%, at least 70%, at least 80%, at least 90%, at least 95%, at least 99%, or 100% of the uracils are chemically modified to 5-methoxyuracil.

41. The method of claim 1, wherein the pharmaceutical composition further comprises a delivery agent.

42. The method of claim 41, wherein the delivery agent comprises a lipid nanoparticle.

43. The method of claim 42, wherein the lipid nanoparticle comprises:
(a) (i) Compound II, (ii) Cholesterol, and (iii) PEG-DMG or Compound I;
(b) (i) Compound VI, (ii) Cholesterol, and (iii) PEG-DMG or Compound I;
(c) (i) Compound II, (ii) DSPC or DOPE, (iii) Cholesterol, and (iv) PEG-DMG or Compound I;
(d) (i) Compound VI, (ii) DSPC or DOPE, (iii) Cholesterol, and (iv) PEG-DMG or Compound I;
(e) (i) Compound II, (ii) Cholesterol, and (iii) Compound I; or
(f) (i) Compound II, (ii) DSPC or DOPE, (iii) Cholesterol, and (iv) Compound I.
